United States Patent Application Publication US 2005/0203280 A1 - sequence listing, part 3

SEQ ID NO: 6651 - DNA, 1754382 bp, Alloiococcus otitidis
ccttcattcggttggcaagctgctaggacaagcgctgaagaaaaaattagcgatagcttcttaaaatagtgagatttgctcattaaaatagcctcctgttttagtctacaagttgtgggcaacgtctacacaattctaattctacagggcgaatacttttttccaataaattacaagtcaagtttttgtaaatattgtaaattttgctttaaggatgttaataaagaatttgctggtccaggcaagtaaaaggaccggccacaagaccagtcctccaaattattgaattagtttttttagtgtcgattggtattgggctacaagtcggtctacaatttcttgggctgtggctaaattgtctatttgtcctgccacttccccggcataatggaggccggcttccccttccttggccaagaggtcagggtcatcttgacagctagcttttaagctccgaacccggccacccgggtggagttcactaaccagggtgtcctggtcctggcaggccagtaattttttgcggtagaggtcactgatggggcattctttagccgacaaaaacaaggtccccaactgaacaccacaagctcccagacattccgctgctgcaatggcctgtcctgacccgataccgcctgccgctacaaccggaatgtcaacagcctggaccacctggggcaggctagccatggttgacgtccaaccaatgtgaccacctgcttcttgaccttctactacgatggcatccacccctaaggcttccattttctgggcctggctcaccgtcgacaggactgggatgaccttgatgtccaaatcccttaaatcttggacaaaagctttgggactgccagcaccggtcatcaccacagggggtttcacttctttgatcacttccaggaggtcaaaaatattatcttgctggagcattaggttgacggcaaagggctgatcaatccgcttttggacttcctggatatcctggctcaactcttggggagtcagccccatggaggtcaaaacacccaagccacccgcttgactcacggcagaaaccaggtcaggtctggaaatcttcgccattccgccttgaataattgggtagcttatgcccagtaggctggttagtcgctcatccatcatggtctaccatcttctttccattctttataaattccttttatatgatataccagatctccaacaaatactaggaataaaaggaagtttgtcacaaatggaaagccccttttgaatgaaaggcattttaactctgaaacttggctacggtttcctggtattcagccacgagccggtcaatgattgctttggcagtagacttggctttaacttgacctgctacttcgccagcctggatggtcccttggtcaatttctccggcaatggcccggccataagatccttgagtcctttccaagaaaactttagggtctaacccctttaattcatcggccaagagttcagccaagaaaggagaggcaacggacctgacccggccaccggtactaattccggtaacaatggtatcttggtcgccagcatcaatgacctgctggcggtaggcctcgctaatggcacactcttctgctgccaaaaacaaggtccctatttgtaccccgcatgcccctaaacattctgctgcagcaatggcctggcctgacccgattccaccagcagcaataactggcatatcaacagcttgcaccacctggggcagggtggccatggtagaagtgatcccaatgtgaccaccagcttcttggccttcacatactacggcatccacacccaaggcttccattttcttggcatgcttgacggcagagacaaccgggataactttgatgccaagtgcttgcaagtcttgggcaaagtctttcggggtccccgctccagttaagacaacggctggtttttcttccttgacaacctccaacaattcaggaatgttgtccaactgcaacatcaagttgaccccaaagggcttgtccgtcaaacggcggatttcctggatgtccgcccgaaaacccgctgcatccaccccaaccgaggttaaaacgcctaggccacctgcactgctgacagcactgactaattctggcttactaatccgggccatcccaccctggataattgggtactgggttcccaagaggtcggttaaacgtctatcaatcatcttatcttcctccttgtagtgatttcatttttatcttaccctatccttaattagatagctagtgaaattttaaaaatatagacctaatgacgccttattatcaagctctatagccaaaaaccatgctcaatttttggcaaaaaacaattataattcttaatacttacttattttatagtctttcctgtccctgtttatggctaagttataagaggaaatacaaggggctaaagcccataaaatcaagctttccttaagccttttcataaaaattaaatacgggttagtatcattatcatagagcctttgaaatcggtgtcacaattttatgaatttactttgacaagccacccaataatagtgtatatttaaaccaatgacaagattatagacggggggatgctattcgttgatccaagtccatacaatgataggtccattataacttgtaatgagacctttgggctattgcctagaaaagatttggaaggataggcttttatgtcaaaaagaaagcgtttttaatcctgtgcaggccaagtctaggaaggagattcataccacttatcaataaaaatctatccgtcatttcaagctaagcagaagatgacaaagagacctaaaatattatttataaaggagcaattattatgtcacaagatttaaagaagcatgacggtgtctacccaggttggtggatagtcgtcaccggattcctagcaatggctattatcttcccggccggtctagctcttatgagtgtcttgatcgggccgatcgctgaatcctttggcgttcccacatccaccgtttccgtccaattctccatgatcaccctcttttcgatgttcgggtccatgacctcaggttacttcttcgataaatttgggatgaagaaaaccatgctggcttcaaccttaatcgctattattggtttccttgccttagccttctcgccaaccatttacttaaactatgttattgctgccatcatgggctttgcccttccgttggtgaccaatgtggggatttcagttatcgttaacgtctggtttggtaagaaactagcaggtaacgctgtcggaattgccatgactggtagtggtttcggtgccatgatcttaaccccagttatgacccaaattatcgaaaactttgaagcgagctggcgggctggttacatcttcttagccatcttatccaccttgatcgttttgccttttgtcatttttgccattaaagaaagtcctgaagcagaaggtatccaaaaaattgggactggatcacctgatggtgaaagtggtggctcttctattaaagaagacagtaactatgggattaccctaagcaaggccaaatcaacagcagccttttatatcacagccttcattattattgtcggttccctagttggtttgattttcttcaccattgcttacgaatattttgtagaaactggattttcaccagaatttgcctctatcctcctatctgtccaagcggcagctgttattgttgggaagtacttcatgggggccttaagtgaccggaccaatgcctttgtttctacctttatcgttgctgccttcatgctagctggtgtcctttgcatcatgctggtcaacggtagccaggtcctagcaattatcgctatgctcttgtttgggatcgggaacgctatcggtactatttccgtccctacccttacccaagatgtctttggaaatgttaactacagtaagatcgttggtttaatgacaacctttgcaggtttaggtgcagcagttggccctatccttacttctaccattctagacctttcaggtagctttatggttccttggtctgtagcagcaggtgctttaatcctagctcttatcttaactgttgtcctaagccgaatcagcaagaatatggaagaacaacgccttccttctaacaaccaataagatggtttcctctagacaaggataatcaaccacaaatcaaaaccttgaccaggactcctaagtgtctggtcaaggtttttttattaaaaagggcttgccaatctttgccaggtccttttattctggccacacaagcccactgttaacgaaagccaagcttggcgaggtcggcctggatggcttgggttacctggtcacttggatagtagtggtcatcaatggcttcaacattttgaacccccatcagggcattactgataaaacattcatcaaagctggccaagtcttgggccgggatcaggccttcttcaatgtcgtaatgatccagcaggtaagaccgcatagtgccagctaacagtcctgaagatagggcaggggtatagattttgccgtctttgaccaagaagatattggcaaaggcagtctcagccacttgacccgcttcattgacaaagagggctgaatcaaagcccttatctttggctaagtggtcttccaaaatattttcatagtaggccaaactcttgtggtaaatgagcttggaagtggtgtttctttgcacttgggaaatggttaagtggaacttatccttattatcccggtaagggtctggtcggtgggtcaagaccaggttgtcatctgacaccattacttttaaagcaaagttgtcctcatcaacctggtcaatgtagtcaaggatactgtcttggtccaactcgcgttcaataccaaaaaagtccaaactagacgccagccgggctaagtgggcctgcaaaaagagggggcggttgcccaccaccttgatggtttcaaaagcccccttaccaaaagaaaatccttggtcaaattcaattttcattgtattccctcacttggtctgcaattttgcggtaagtgatgtagtcaatggtttgggccgcatccgtccaggcctcatcaggctgggagtggacttctaccatgaccccatctgctcccatggccaaggccgccttggtcatgggttcgattaattgccgcttgcctgtcccgtgactggggtcaacaataacaggatagcctgttttttccttaatcaagtaagccccagccaggtccaaggtattgcgggtttcggtctcaaaagtccggatgccccgctcacaaaagataatctggtcattgccttcttgctcaatatacttggcggccatctcccactcgtggagggttgcggccaagcctcgttttaacaagactggtttaccagtcgctcctaccttcttcagtaaggagtagttgtacatattacgggctccgatttgaaaaacatcgacatagtcaaccatggtctcgacatggtcttcgctcaagacctcggtcacgatcggcaagccagtctcttccgaagcttctttcaagtaatccagcccctcaaagcctagaccttggaaggtgtcgggcttggttcgtggtttgaaggccccgccccgcaagaggtcaactccgatttttttcaaggacttggcttcttctagaatgtggtctctcgattcaattgaacaagggcctgcgatcaggacagcttgatcttgaccgataactaaatcttttaccttcacaactttttgatttgctggcatccccatttttattcccccttattacttccttcaatcttaattgggtcatcattatggtaataggcttgcaaggcggacaaggcccccttagcttttaaaacaacttcatcaaactcttcttcaggatcagatagcatgacaatcgcaccccccaggccgatgcttgccttgtctgcttccaccacactggtccggatgacgatgttgaagtctatagtggaattgttggctaaaaagccaatagtcccagaatagatccctctgggaactgcttctaagtcatcaataatttccagggttctttttttaggcgccccagtcatggacccgcccgggaaggtgttttctaacacttcaaccacatctaggtcttctttgacccggcctgaaaccgtggtaaccagctggtggagggtggagtaggtctctacatccatcagtttgggtacctcaaccgacccgatttcacaaaaacggcccagatcattgcgcaagaggtcgacaatcatcaggttttctgccttggttttctcttcactgcggaggccttctatcaagtcttggtcttcttggtcatctgtcccccgtctgaccgtccccttgatgggcttagtggtcacaacccggtccttgtcgacattaataaaacgctccatggaagaggaaagaacttgaaaatcatctaaaggcaaaaaggcagagtactgaccgggactttcctggcgcaagtgtttgtaataagcgaggccatcaatctgaccctcaatatccagccggttggtcaagcaaacttcataactttccccagccttgatcaggtcttggatggtttcaatgtctttgatataggctgctttgtctttgacgaaggccagtcgtgggaagtcttgcttgcctcttggtccttcttgctgaactttgactgcctgcttgagcctgtctttgaccgcttgaatccaatcctggtcatcctggtaggagaggaagtaaaggtcctcttcctggtggtcatagaccaaggcccggtcacaataagtaaagtaggcatccggatagggtgactggtgcttgttgtggacttgaactgtatcttttttgacctcatagccgatatagccaatatagcctagctgaaagtcaaagggcaaggccggctcataaggccattttggtcggttggcttttaagtaagaaaagatgtcagtctggaagctttcaactgctgcggactggctatcttgttttttcacttctttttggtcgacatcgtattttaaggtgtggccccgctttggtccagccatgccaaagatggaaaaccgtgacaagccaggctccaccttgctggagtcgagccaaagtacttggtcatcaattttggccaattgatcgtagaggtcttggctgtccctagttcccggaactttttcataataaaggctggattggttatagtagtcctggcacaaggccataaagttttccatcattttttccccatactgggtggcaatggattcggggtggaattggaccccatagatgggcttggtcttgtgggacagggccatgacaattccatcatcggttttggcatcgatttgaatattctctaattccttgtcttcacaaacaatggagtggtagcggttgacttcaaagccttggtctatgccgtcaaagatatttttcccattatggtagaccgaactctgccgaccatgcatggggatatcagcccccactaagttgccaccgttataataataaatgccctggtggcccaggcaaatgccaaagataggcttgtcaagcttttcaattacttgccggcacaagccgaagtccttgtcccggtccggactaccgggccccggtgaaataatgacattatcaaagtcgagatccaatagttcttggtaggtcatctggtcattttttatcaccatgggctctttccctgtgaccttcccaataagctggtataagttgtaagtataagaatcatagttatcgataatgagtgacttcatccttgtccctccaaatagtctctaaggtagtttatggccttgcggtaacctgcaatgcccaagttttcaaatgactggatggcaaagtccctgacatagttgacctggcggaagtcctcacgctgggatacctttgacaaatggacttccactgtcggcaaatcaacagccttcaaagcatccaggagggcaatactggtgtgggtgtaggctgccgggttaatcacaatcccgtctgcatcctggtagttggcttggataaaatcaaccaagtccccttcatggttggactggaaatggatgaggtcaacccctaattccacctggacttggtcgagtaagtccaataagtcttggtagctttcccgaccataaatctccacttcccggactcctagcaggttaatattggggccattcatcactaaaattttcatcatcagccaaacctttccatatcaagtcgagagttgcctccttgtcttctacaacatctacctgcaagtctgctaggccttcatataagggttgccttgaccgggccatctttttgaggctggttcggtccttggacaaggtccgcttgctagtatccagcttgtccactggccggttgaggtagaccaggagtgaattttgggctagcatttgccggttgtcccttcttaagacggacccgccccctgttgcaattacctggcccccttctttgctcacttctgctaggacctggctttctagttgacggaagtagtcttcgccgtactggtcaaaaagactgggaattggcaggccagccctctcctccaccagctggtcaatgtctcgaaccggtcgaccggtcttttgacctaggagttgggccatggtagtcttgcccgaagcaggcatcccaatcagtgcaatattggccaagtcttttttgaccttggaatagacttggtctagtagtgctttatctaatttctggtcagtaaagatttggcaggcataaaaggcttgggcgaccagcatcaagaggcccgacatgatcttgacccctttttctttggcctctaggaggagcttagtctttaagggattatagatcaaatcaatgacactgtctaagtgctgaaagttagccaggtcaatcttggattccaggttatgggggtacatgccaactggagtagcattgatgataatgtcaacgtcttgaaactggtccagcatttggtaatccttgggcccggaccgacttatcacaatgatttcttgagctgactggtccttggcgtaagcctggaccatcttgctggccccgccactacctaaaaccatgacttttttacccttcaaatggatcctataggctttcaagctgtgggcaaagcccaggtagtcggtattatagcctagtaagcggccgttctggttgacgatagtgttgacggccccaattgcctgggcccttgggtccacatagtccaaatagtccatgactgtttctttatagggaatggtcacattaatccctttaaagcttctttgcttcataaaagcttctaagtcctggcctgggatattaacgagccggtaagaatagtagccaaaagcttcatggatttcttgggacttactatgggagagacttgccccgatcaaaccgtagtcaaactgccccaggtcagctaagttaactgggtcttggtcattcttctgtctcatctttccttgtccccttcgattaggaggtccaaaatggcgatagcggtcaccatttcaagggcaacagctgccctgggaacaatagaggggtcatgccgtccttcaattttgagttgggtgttgcttttatccttgagagagaccgtatcttggaccttaccaatggaagaagtgggtttaaccggcacccggaagacaattggcatggaagaactcaagcccccaataaccccaccgtggttgttggtcttggtttttacctggtcaccgtcgtaataataggggtcattgtgttcactcccccgcatctcagctgccttaaagccactgccaaactcaatccccttgacagctggaaccgaaaagatggcggaagccaattgggactcaactgaatgaaatcggggctggccgtaaccgacaggcatatttaacaccacgacttccacaattcccccaatggagtcttcctcttccttaacctttaagatctcttcttgcatggctaacttggcctggtcgtcgatagtcggcaggtcatcgtttttcagtttttccagctggtctaggtcaattttagagtagtcaacctccacatcatgggcctggccaatttgcttgacccgtgaaaaaacccggatatttctttgctgcaaaaggtcttctgcaatcgagcctgcaatgaccatgggagcggtcatccggcctgaaaattgccccccacccctaatgtcattgtggccctggtacttgacataggctgggtagtcggaatgggatggccggggcttgtcccggatatcatcatagtctttacttttcttgtccttgttttcgataatggcacaaataggggccccacaagtgacgccatctacttcaccgctgacaattttaaactcatctagctccttgcgcggggtcgaatacttgttttttcctggccgtctccggtacatatttttccggatcaagtcataattaatttcataacccgcctggatcccatcgatgacaacaccaatagcctgggagtgagactggccaaacaaggtgagtttataattttttcccatatcataagacatctacttttcctcctaatgatttaaaatcttcaaaaaaaccagggtaggatttttccacactgtggctatccatcacggtaactggaccatcggcaaaagttgctgcaatgctagcagccatggcaatccggtggtcgttgtgggcatggactgtacaggacttgtagcagtcgactccagtaaagctaaaagtgtcttcccctatggtcaccttgacccctaagttttctagcatttggctggtggaaaggactcggtcactttcttttaaccgcagtcgcttggtatggaccacccgagttttggtctggcataagccggccaagacacagagaataggaacagtatcgggcatgtctctggcatccaggctgacttcttcctggctgggatatcgtttaactagatgaaagtccttttgtgacatattctcatagcccaggctttgtaaaaaggtcaaagcctggcggtccccctgcttggagtcagggtttaagccctgcacctcaaccccgcctgctaggaaaaagagggcattggaccaatctttttcgacttgatagtaacgagcttggaaggggccctggcaggtgtaagttgaaccttcttgcttgacctggacaccaaagtgggccataacatccacggtcatgtcaatataaggcttggattccagtgccgtagtaatatcaatttgggctggttggccggcaataccagatgcaagaaggaagcccgagataaattgggagctaatattgcctggcaaactaaagtgatagtcctcaagcttgccctttaaaaagatagacggcccctgctgggaaatcgccaccccatgctcagggaagctgtcaaagtaaaccacattggtccggttaattagactaccggaccggatgacttctgcttctatccctaaagcagccaaaactggcaggatcaatctcagggtcgtcccgctttcgccaacgggaattctggcagggcttgtatactggtctggcggacaaatggagtagtgactgccttcttgcttaacttccactccaatggctgcaactgcttttagagaagcctcaatatccttggacaggtggttgataactaactgcgacgctccttttgacagggcggcacaaaaaatagctcggtgggcataagacttagaagaaattccctcaattgccccgtgtaacttttccttgccaatcattctatccataatctttacccatttctatgatttctgctagctgatccagagaaagcttttgactggttacctcacccatccttaaaggaaggataatattgatggtctctccttgaatttttttgtcatgctctatggcctctaggagttcttgggtatcaaagtcataccgggttggcaagccatacttgtgaaaggcttggaccaagtcttgggcaatatcctcctggcataggcccatcttgtaactcgcccgggaaatatagatggtgccaatcccgatcgattcgccgtggttgaggtcatagttggatatcgattcgatcccatgaccaatagtgtgacccaggtttaatttttgcctttttcctttatctttcacatcatttttaacaaaagccaacttggtcaaaatagactggtggatgattttttcaaaatctaatttttccgcttctttcaagtaggtaaaaaagtcagcatcagacaaaaccgcatacttgaaaacctcagccaaaccgttattgatattgcgcttgtctaagctttttaaaaaagaataatctatatgaacataggagggaaagtaaaaactaccaatttggttctttaagtgccggaagttaatcccggttttccccccaaccgacgagtccaccatggctaagagactagtggggaccgcaaccaggcgaatacctcgtaggtaggccgaggccgcaaagcctgccaagtcgccaaccacgcctccaccaaaggcaataaccgtatcgcccctagtgaagttgttctcagataaatagcggttaatggcaataaagttttccatggacttggactcttccccgccagctatggtaaatagtttagcatccaagcctcttaggagactgttgagccggtcttggtaaatgtcaaagacggtctggtccgttacaagtaaaaacttagagtctttaaactgatttaaaaaatcaatcagttgattgtcgctctggtagccaatatgtatatcgtagtggttgtcttttactggaactttcataaacccacccctcactatattatgaatagattctatcatagattagctaaatattaaaatgacaaagggtatcatttttttcacctgccttcatccgattttattccgatggctaagcttagcttgactgaccccaaaaattgcaaagtgatgggccataagctgtccatcttctgacctagccgtagttatacaaatagccaataatgcatcaggtatagcaatcggataataaaaaagcctagccggataaactcggctagggtctatagttaagggggaaaatttccctattctattatgaataactcctttggtgtacggtcctaatattttggctaactgacgagccgattcattcagccccgtcagccagtatgatctaaacagccagggcagtataggtcaattaaaatacaaaaagctccgcaagtaggattcgaacctacgacaacgcgattaacagtcgcgcgctctaccactgagctattgcggaatcatcaaaatgttaatgataaaaggaaaggaaagcgtggcaacgtccggctttcacacagggaaaccctgcattatcctcggcgctcagaagcttaacgactgtgttcggcatgggaacaggtgggtccttctggccatcatcaccacacattttgccttgttccttcaaaactgaatagttgaaccatcaacgccaccgaactttcacttactcacttgcgtggttaagtcctcgaccgattagtacttgtccgctccatgtatcgctacacttccacttcaagcctatcgacctgatcatctctcaggggtcttacttccttcttggaatgggagatctcatcttaaagggggcttcacgcttagatgctttcagcgcttatccttcccgcacatagctacccagctctgccatgggcatgacaactggtgcaccagcggtgcgtccatcccggtcctctcgtactaaggatagctctcttcaaatctccaacgcccgcgacggatagggaccgaactgtctcacgacgttctgaacccagctcgcgtaccgctttaatgggcgaacagcccaacccttgggaccgacttcagccccaggatgcgatgagccgacatcgaggtgccaaacctccccgtcgatgtgaactcttgggggagataagcctgttatccccagggtagcttttatccgttgagcgatggcccttccatgcggaaccaccggatcactaagcccgactttcgtccctgctcgacttgtctgtctcgcagtcaagctcccttctgcctttacactctgcgaatgatttccaaccattctgagggaacctttgggcgcctccgttacactttgggaggcgaccgccccagtcaaactgcccacctgacactgtcttcccacccggttagggtggcgagttagaggggtcataccgttagggtagtatcccaccaatgcctccctctagactagcgtccagagttccttggctcctacctatcctgtacaaacggtacaaacactcaatatcaagctacagtaaagctccatggggtctttccgtcctgtcgcgggtaacctgcatcttcacaggtactataatttcaccgagtctctcgttgagacagtgcccagatcgttgcacctttcgtgcgggtcggaacttacccgacaaggaatttcgctaccttaggaccgttatagttacggccgccgtttactggggcttcatttcagtgcttcgcttgggctaacacgtccacttaaccttccagcaccgggcaggtgtcagcccctatacgtcttctttcgaattagcagagacctgtgtttttggtaaacagtcgcctgggcctattcactgcggctgacttgcgtcagcgccccttctcccgaagttacggggccattttgccgagttccttaacgagagttcactcgctcaccttagaatactcatctcgacgacctgtgtcggtttgcggtacgggtcctttctttctccctagaaatttttcttggcagtgtgacgccgatccttcggtactcatcttccctccccatcactagtcaccgtcggtgcgaagcttttcactcctcacctagctcctagcttggacgcgctagtccagcagcgcgctactctttgcctcctgcgtccttccgtcagtcaaacgaaagaaagaagtacaggaatatcaacctgttgaccatcgcttacgccggtcggcctcagcttaggtcccgactaaccctgggtggacgagccttccccaggaaaccttcgtcattcggtggacgggattctcacccgtctttcgctactcataccggcagtctcacttcgatgcgctccactggtcctgacggtccagcttctccgcccatcgaacgctctcctaccatagaaattctatccgtggcttcggtaccttgtttagccccggtacattttcggcgcagggccactcgactagtgagctattacgcactctttcaaggatggctgcttctaagccaacctcctagttgtctaagcagccccacatccttttccacttaacaaggatttggggaccttagccgacggtctgggttgtttccctctccactacggatcttatcactcgcagtgtgactcccggactggcatgggtggcattcggagtttatcaggattcggtaccccgataaggggccctcgtccaaacagtcgctctacctccaccatgcaccatccgaggctagccctaaagctatttcggagagaaccagctatctccaggttcgattggaatttcaccgctacccacacgtcatccccgcatttttcagcatacgtgggttcgggcctccagtgcgtttcaccgcaccttcaccctgcacatgggtaggtcacctggtttcgggtcgacgaccgcctactcgacgccctcttcagactcgctttcgcttcggctccgcttcttcagcttaacctcgcagtcgatcgtcactcgccggtccattctacaaaaggtacgccatcacccataaacgggctctgactacttgtaagcatacggtttcaggtgctctttcactcccctcccggggttcttttcacctttccctcacggtactggttcactatcggtcactagggagtatttaggcttgggagatggtcctcccggcttccgacggcatagcacgtgtgccgtcgtactcaggatcctcatgggccgaccgctcggtcggttacagggctatcacctgctctggccacccttcccagggtgttcaccttaaacggccggtcccgacattgagtcctacaacccagacatgcaagcatgtctgtttggcctctttcccgttcgctcgccgctactagggaaatcactcttgttttctcttcctacagctactgagatgtttcagttcaccgcgtcttcccctaagaaagctatggattcactttcctagtcccatccgactaaagatgggaggttgccccattcggaaatctccggatcaaagcttacttacagctccccgaagcatatcggtgttcgttccgtccttcatcggctcctagtgccaaggcattcaccgtacgcccttattcacttaaccgaagttaagtgagtatgtgtagcgttgtgttctcgtttattgccttgcaataaaatagactcttcaacgtggaatgattgctcattccgctatctcggtgttgtcttcatttgatgataaatgtcgattcaactattcagttttcaaagaacaagggaaggaatacatccttcaaaactaaacaaacaatggcctagtgcaagtttccctgccctttggcaggatccttagaaaggaggtgatccagccgcaccttccgatacggctaccttgttacgacttcaccccaatcatccaacccaccttcgacggctggctccaaatggttgcccggccggcttcgggtgtttcagactctcgtggtgtgacgggcggtgtgtacaagacccgggaacgaattcaccgcggcattctgatccgcgattactagcgattccgacttcatgcaggcgagttgcagcctgcaatccgaactgagaatggctttgggagattagctaaacctcacggtctcgccactcgttgtaccatccattgtagcacgtgtgtagcccagctcataaggggcatgatgatttgacgtcatccccgccttcctccggtttatcaccggcagtcttgctagagtgcccaactcaatgctggcaactaacaataagggttgcgctcgttacgggacttaacccaacatctcacgacacgagctgacgacaaccatgcaccacctgtcattctgtccccgaagggaacccttcatctctgaaggtggcagaagatgtcaagagctggtaaggttcttcgcgttgcttcgaattaaaccacatgctccaccgcttgtgcgggtccccgtcaattcttttgagtttcaaccttgcggtcgtaatccccaggcggagtgcttaatgcgttaactccagcactgaagggcggaaaccctccaacacttagcactcatcgtttacggcgtggactaccagggtatctaatcctgttcgctccccacgctttcgagcctcagcgtcaatcatagcccagaaagtcgctttcgccactggtgttcctccatatatctacgcattccaccgctacacatggaattccactttcctctgctacattcaagtccgccagtttccaatgccgttccacggttgagccgtgggctttcacatcagacttaccggaccgcctgcgctcgctttacgcccaataaatccggacaacgcttgtcacctacgtattaccgcggctgctggcacgtagttagccgtgactttctggttgggtaccgtcaagggataggcagtgactcctatccgtgttcttccccaacaacagagctttacgaaccgaagtccttcttcactcacgcggcattgctccatcaggcttgcacccattgtggaagattccctactgctgcctcccgtaggagtctggaccgtgtctcagttccagtgtggccgatcaccctctcaagtcggctacgcatcatggccttggtaggcctttaccctaccaactagctaatgcgccgcgaggctatccataagcggtagcagagccacctttcattttcccagcatgcactggtaaaacatatgcggtattagcacccgtttccgggtgttatccccctcttatgggcaagttcctcacgtgttactcacccgttcgccactccgcctcttcctgcaagcaggaagatttggcgttcgacttgcatgtattaggcatgccgccagcgttcgtcctgagccaagatcaaactctcgttttaaaagagttcaggttaacacctgttctatcttggttcattgttgtcataagttttcaaaaacttatcaaaagtacttgaattgtctccctttacaaaagtaaagcttgagacccttgcacttcttggtgtttatcttatttagttttcaaagatctaagttgcttgtctgtctttcacagcaactcattcataataccactgtattatgaatgagtcaaggactttgttcaattaactttaggtaattttcaattgaattttgtctcttttgcgacgacaagaaacagtatagcaaggggaccatttttagtcaagggaatcttacatatttattttctttactcaaaaatgtcaaaccagaaaagagattacccttcttcttgcataaaggagaaatctgcttcttcttttttagttatcaatagaagaccgtctcctaaaggaaggatggtggaatccaaggcaggatgatccaagaccacgtctaaaaaatcatttaatttccggtgaatcttgcggactcgtttggggatttcttccagatcttgtaagacagtccctccctgcaggacatcatcaacagcaatgatgccgcccttttgcaagagacggaagcaatctgggaaaaaagagtaatatttagccttagcactgtccataaagataaagtcatatgcgtcactttctagttctttaagaatctccttagcctggcctttttttaggatgattttgtcttctaaatttaaatccgcaaaaactttttccgcccgttggtacatatcgggattgcgttcaatcgttataacacgtcctccatccatctggtctgccatcaaggctgccgaaaagcctatagccgtccctacttctaaaacggctttcggttggacttggtgaaagagccatataaggaaaacaactgtttcatggggaatgatcggaatccggttttggtgggcaaaggattcaatttcttttaaaggacccttcagctgcctttgtcccttgcgtaagaactcccgcacatcattattaatcacgggacggtccatcatttcattgcgtttatgcattatttttcctctttcattataatttaataaacattttctcatcatttttggtataatcctattgaaaccactacaggaggagaaaacatgttaatcaaacaattatcaaaacacaaggatgaggtcagaacgatttcggaagacaccaccctacaagaagctattgacttgcttgaagcaaccggcttccgttgtgtaccaattttagacgagacaggcaagatctacaggggcaacatctacaagatgcacatctaccggcacaagtcacgaggcggggacatgtcactgccggtcacccacctcttgaagaatgccaccaaatatatccacttaaagtcttctttcttcaaggtcttctttatgattaaagacttaccttatatcactgtcttggatgaaaataaccatttctatgggatcttgacccactcctcgctcattgatatgttacaacaatcatggagtattgagcaagggtcttatgtcatcaccgtagctgttccgattgaaaaaggttctttggcagaagttgccaagatcatcaaccggacttgttccattatgagtgtcctctcccttgacctcaaacacgaacaaggccacaccaaggtccgccgcctaatcttcactttagagcccaatattcaacaaaaagacttggacaccatccagcgtaatctagataaaaaaggctactctatcgtctccgttgaagacttacaggaaaactaagttaatcagccaaaaagacccaagcgagagatggcttgggtctttttggctagttattctataagttttaaaaaccataagctttagcaattaagaatttggataattgttaattagacaaggagtatccttcgcggtaaacatctccataagcgaaataatcttcaccatcatagccggctatagatatactaccaaagccatagaatgttgcctttctttctcttataatattacgccctgtactgctaattaattctgttatcgcttcatcttcttgattaagctctgattgatctaggataatagagccatcacgattgactaaaaatcttcgctgggttaggaggtcgtcaaagtcctgatcaaattgctcatgctgtaaaagaatataggctaagacctggggaatatagcctccgccaggacttccaatagcatacttttcactatccctctctacaattataggcgaagcagtggtccttgcccgtttatatggctcataggaatttatcccagtattagaaaaatttcgatttgagttatttagaaaaaaaccgtccacctgaactcggctaccccaaaagttggacaaggtattggtagctgaaataaccattccatcttggtcaactattgatagatgagtggtcgagcctggctcttcttcaaactgggctataggtggtccctcttctcgactaaccactttagactgggccaaatagtcctcttggtcaaaatcataaaatgaaggatctgcaattgtctggcttccatcattgcgtgcatctacataagtcttttggtaaacatcaaaaaattggtttggactttcttctaatggtctaataccttggtcaatcatatctcggtacatctgcatggtcatttgtgagccaaagggagccggagcaccaatcaatcggtgttcaccaaagtttagaataatggggtctatttttcttgtttggtattctttgaattcttcaaaatctagtccagctgcttcagcaacccgcctgcccatctctccttcataaaaagaagtaatacccttagcttgtatttctctgaaagactcagctaagtcattttgtataagtcgatctcctgtttctagtggttgaccttcctcatcaataaaattttcaaactgttcaacttgaccacctaatgtggctatcttataagaaagcttggggctgatagtaaaaccttcttccgcaacaataattgctggttcaattaaatcttcccaagggagcttgccatgatcttgatggatttgccaaagcccattcaactgacctggaataccaatttggttcttttggctgccagcttgggccatataatcataaaaagtatactcttctgtatctggatcaaaaactaatgctccccctgatccaccaattcctgacccaaaaccctctgttacatttaacataaatgagctggcaactaggacatcagcagcagaaccccctttttctaagacccattctcctagttcggtagctaatttttctgaagtagaaatgccgtaatgaagactgattgagttgttttcttgttcattgacttctttatcgacatagctttccaaagagtttcctgaaggctgacaggctattagtaagcaacttaaaaagatcgataaaccaatggtataaattttcttcatcactttgactcctcttttaaatagatatcagatataaaactaaacctactataagagtcaatcccaatgacgcagccaaagttatcggcagtgactgtcgtcgataagtattggccagtaaaccgggaactactgccccaatccccctaaacataaccgaatctaagggaaggagagtaggaaataagaatagttcaataatcaattttaatgccaaagctaccaagatatttaaaacaaaataacgcttcccatataaaatgacgaatttcgaaatcccataattaacaatcaaatagactagcagtgagattaaatatacctgaagaagcatcaagggctcatcaatataaagggctaggtatcctggggcaatcataccaccagcaataattccaaaaaagctttctactaatagggatagtgttaagcccaaagccaaggcaatataaaaatctgttagagccattaattcattctccttctctgccacaagttattttcatcaaggtaagcaaaaaaatcttcaccgacaccatgaatatttccaatacccaagacaacttcaccagaagcataagtcattagggtcatgtaaatatcttccaaggatttcccttccaaagataaataatccctgaccttgatcctacctgattttatagccttctcaataatgccagtattttgtccaatggcgataaccctggcatcttttatttgaccaataaagtctttggtgaataatttagtccggtcactgcggtcttctcggcaattgatcaaaataatagggctttcacctattaggccaccttccttgagctcttcatagatcagcatggtagaagtgggttcattagcagcaaaggcataagctagaataaccttctggtcaataggctcccctatctcaaacaattgcataatgcccggatcagggtcagcttgaagcatacctttaatggcagtatcgcggtcaacgtcgagttcttcagcaatagccagcggaacagctagattgtttgggaagacaagatagtcaaagcgatccaataattcttgactaacgcctggttcgtctataactttcacccggcaatttctctcctgggctacttcaataaaaaagtctttatagtcatcatctgagatgacaacaaggccatttttggggatggtcttggcataggcccaggcaatttgatcatttgttggacctaggatatccatatggtcttcaaagacgttaacgatggctgtaatatttgattgaaacatttcattagaataaacatcttggtactctggattaactgccatacattctaatacaagggcatcagcccctctttttcttgccttttcaataactgatatttgttcagaaatattaggtccagatggaggcctttcgatctcctcctcttctgcctggtcccagtaaataatgcgtgactcagttcctgttgtttttccaataacttggtagccagctgcttgtagcaccccagtaaccaaacgagtcactgttgtcttgcctctggtgccattaatattaatgcgtaggtcgatttttttaatattttcctcgttacgctgcttctctataacacctaggccaataagaagaccaatacagagaacaataacaatcaaggaagtcatggcgtacctccatcattagctaagtcaaagtcaattactatattgtcagctctatcaatcttaaagtcttgatcgtctagtcgctcagtcaagcgtttttgaatcctttgagtgaccaagccattaggattgggtttgggaataccagcttctattttcattggccttaaggtaaaacgaacctggtctggactattgatatccatgtctaaaataacggaatcggttgaactttgcatgccttggtcaaaaataaaattgcccaagccataaaaaataatcccatcttggtatttttcaacaggcaggagggagtgggtgtgggagcaaataacaatatctgcaccagcatcaattaagctttcagccagctcctggtggtttgcatcaggttgacgaatatactctattccagcatggatataggcgataaccaaatcagattcttggtcatagctattggccaggttaagaaaggcttgggagttggtcgtgagtacacctggttcatcatcactagctgcttggccaggtttaatcacatcgctaactgcaaaaatggaggtagtcaaattattcgcaacaaattgataagcttggccagcttctgctcgatcatggcccattccaatataatccatttctacatctcttaaaatttccatgccgtcaaccataccctgcttgcccatgtcgccggtatggttgttggccatggaaactaggtcaatgccagcttcttgcatggctttgactgagtcaatggaagaatccaaataaatacctccacttaaacttgaagccggcttaacgtaagttcgattgtcataggtgacggcagattcaagattggcaacgaccaagtctctaccgtcaaaatgtggtttaacatatgtaaaaaattcctcgtaaccatctcgttcaccgatttccgcaatatagcgactcaaggatatatcgcccacaaatgatatagaaggggtctcagcattggcttggacatggaattgagactccgggttagcttggttggaaaattccctgtaaaaaaatcccccaatagcaagacaaaatacaatgactaaaaatacaagagcttggcccagactggtttcatttcgtttaaggtaaatttggatcctatctttaagtgactgcttcttgtgcaattcagcacggggtggtagtttcaactttaaattctccttttagcatgacaaggcataatgcaaaccctttatttttagtgcttactgagttctgttaaagatagaaagcacatactcctaatcctacagaaaaaaaaaaaaaaaaaacaaggggttcccttgttttgtcaatagtttttctagagtaatttggtttgaaaaacaagcataagatcagctcgttatgtaccagccctttgacactatctcaagcaattggcagaaaaataaaacagcaaacaatcactgcttgctgttttattaagtcctccaactcggtttaaaaccacccatattaggtttggactgctctcagtctaaatgacaggagcaactttggcttggggcggtttagatatatttatatttattggaaagtccgatgcttatcctcaaggcatcgtcaatttctttcattttttctttctttagctgtgttaccttgtccttgatccgctgtttgtcaattgtccgaatttgttcaagtaaaacgacagaattcttttctaagccatttttttctccaacctcaacgtgcgtcggcatccggcccttatttatcctagtcgttatggcagcaacaataacagtagggctgtacttgttccctacattattttgcaaaatcaataccggtcgcatgccgccttgttcagaacccaccaccggagatagatctgcataatagatctcccctctttgcaccactggcactcctcctaataaagactcatcggttgaagaatcctatgtcattttacaaatttatattgacctcgttgtcacattcagaaaactcggctgctatctctaaattgaggttagccatttcagcataacccttgcgcatttgattgatcatcattcggctttcatcaacgaagcggtccattaagtgttcaacaatttcgtcctggtcaaaactagattcttcacagtaagcttgaaaggctttgtaagtccccgaatccactttaacagttaattctttagattgttgttcttccatgatacaccctccgaaagaaatattaaatagcgaaaaaggacagcaacactatggctacaattttatcacactttattcacatatcaagccattcagtttactagctctgaaggatggaaaaacaaaataggccagcttctcattctcaattttcctgtaaaaggacctgggccaggcagaggtctctagtgtgagaaattgaaatcaaggcccggccagctttaggatgagatgttaggactggctggccttggtcattgattaggatttcaatatctttaaagctcaagcgtccaataccagttcccaaggctttactgtaagcttctttaccggcaaaccgtcccgctaggaattcaattctccgcctaccagtcgctttctcgaaataagccaactccctttgggttaaaatccgctgggcaaagctgggctttcggtcccaaacagcttgaatccggctcatttcaacaatatccacacccattcctgtaatcacttgtaaccctcctagaatatgttcagacttagggaagtgtcttaagatcttttccctcttcttttttgtcttttacccttattttggccacctttgctctggcgccgttttctctgccccttgtttaagcctcttttatttttggacttcctacctgaccgttctaaatggggcaggtctttttgagggctgagcttgacctctttagcagaaatttggtcctcagtcaagaccttgaccaaaagagccaccaagtctttagccgggtagtggtctaataaatcctctgcagcagggtagagagatgctaggtcgtcttggtcgagactggactgaacattttggtaagctgcatcaagcttgtggtagtataagtcgcttgtagtgggtggttttaggggttggagtttgtggccgatttccttctcaagtttttttaaatagccgtgttccttgggttcgaagaagctgatggccatcccttgcgagcctgcccgtcccgtccgtccaatccggtgggtgtagctttctgcatcttgaggggcatcgaaattgaagacatgggagatatggtcgatgtccaagccccgagcggccaggtcagtggcgactaagagcttgctttggccggtcttgagccggtgtatgacggctaacctttgcttttgggaaaagtcactgtggaggcctgccacttggtaggtcatttgttgcagggcctggaccatttcatccacccgcttcttggtccggacaaagatcaaggcagctttcgggtctaaaacctgcaaaaaggcatggaggacctggaatttttccgagtccttgaccttggtaaagaactggctaactgcttgggccggttgacttttggcccctagactaaccaaatgatagtcggggataaaatcatccgcaatggctaaaacttcttccgacagtgtggccgagaacaaggcaacttgttgcagcttattcaagtaacttagaatctctttgatctcttcaatgaagcccatatctaacatctcgtcagcttcatctaaaacaagccgatgaagacccgaagtatccaccttcccccgctgcaacaagtctagcaaacgacctggtgtggccactaagatttgactgccctgtttaagggacttgatttggtcttggattgaaacaccgccaaaaatagccaggcttttgaaagacttaaagcggccaaaggagtcgatttcccctttgacctggctggccaactcccgggtaggggttaagatcagggcttgaggtctagcttggtcatgatctaataagtcaagcaaggggagggcataggcagctgttttccctgttcccgtctgtgcctggccaatgacatccttcccctctaagagcaaggggatggtctgaacttgaattcgggtcggctggctgtagcccttcttgcttaaggccttaactaaatcagaacttaattgcaggtccaaaaaattcatctgaacgacttcccttctttactagcaccgggactaaaaagcccctgacccattagtccaggggctggttttcatcatcttctttttgacttagggcttggaccacttcaagcagacctgttcctagactggacttcaacaaaagataagaagatgggcccatgatttcttttaaaaagtcggtcaaggcttttcgatcctctgggaaataagtcaagtggtcaggatcaaaatcagccttcaagacctggtagagggctgccatttctggtccatataagacaacccggtctaaaagtttggggtcgatggcttgactaagtgaccggtggagttgaccggacaaagaccctaactcccgcaagtcccctaaaaccgctatcttctccccatctaggtccaaatggctgaaataatccaagaccgccttcatggaagtgggactagcattgtaagcatcatttaataagtgggcctgcttatagccttttagccattccagccggtttttgcttagctgaaactgggccaagccctggacagctagttggaggtccaagtccaggacctgggctaccaagactgcagctagggcgttaatgacattatattttcctggtgaagggatggtaaattgcagactagggtccaggttaagggtgaactggctttgccgctgtccaatctcagtggtcaaaggataaatgtcattgtggggcgattggccaaaacgcaggctgtgggggtggtggttcaaggcagactcaagcaggggttcatccccgttggcaataaagacgccctggtcgcttaggccatctagaatttccagtttggcctgggcaattttgtcccttgacccaaagaactcgatgtgggcctcgccaatcatggtgataatggcaatgtcaggctgcaagagtttggacaaggccgagatctgacctggtccatccatgcccatttcaacaactatgacctggcagtctgcaggcatagctaagatagtcatgggcacgccaagttcattatttaagttgctaactgttttgtgacacttaaatgcttggcccaccacactagccaccatgtccttagtagtggtcttcccattactgccggtgatggcaattttcataggtgcgacagcttcaagatgccacttggccaggtcaactagggcctggtagctatcttctaccttgatcaagggaagacctttaggggctaagcttgaatctttggcccaaaaggctccgctagctccttggtctagggcggcttgggcaaaatcatgaccatcccgctggcctaaaataggaacaaacaagtcacctggttcaagtcgccttgaatcaaagtggaccccggtgacctcctcctggccgtccgcactaactagctctcccccaactgcctgggcaatctcttttaatttccaagacaccgttatgactcctatctatctctcaattgcttagcttgcttcattcggtgacgtttcaagcccaactgaatcaactcttcaatcaagtccttgtagctgagccctgttgcttcccataatttgggatacatactaatagtggtgaagccagggaaggtattgacctcgttgatgtaaattttcttgtcttccgtcacaaaaaagtctgcccgggttagaccactcccatctatggctaaaaaggccttggtcgcatatactttcaactggctgaccacttcagaatctagcttggctgggatatccagttgaaccgtattgttttcatacttagccgcataatcataaaattgggcatccttgaccaattcccctgggacggaagtgtggacatcttcattgcctaggatggacatctcaatttctcgggctgtgaccccttcttccaccacaattcggtggtcatattcaaaggccaaattgatccccgccttgagttccgcttggtcgtggacctgagaaatgccaacactggatcccatattagcgggcttgacaaaaatagggtaacttaaatggctttcgatatctcggaccacttcttctggatcataaacccaattattgtacaaaatagcctggtaggggagttgagggatgccagcttgttcaaatagggctttggatataattttgtccatgccagttgaactagctaaaacaccgcagcccacataagggacatttaaaacctcaaacaagccctgaactgtcccgtcctccccgttcggaccgtggaggactggaaaggctatggcctcctcttcttgaagcttggcaaagtcaaatcgtgttgcagaatcccctaaacgaaggtcgctatctttttggacctggtctgggtcggtaatggttggtccttctaaccagaccccctcgcggctaatgtagaccaaattgacttggtaattatcataaaaaatttcttttaaaatataaaaagcagaaataattgaaatatcatgttcagcgctcttaccgccataaatcaagaaaatatccatcgtcttaaattcccttcactatatagaataccttacttattctagcataaaccctggcccagtaggcaaaaattttgtcaaacttcactaggtcaaccatcctcaaaccctctcctagccctaacaaaagcaaaagacccccaacaaggcctgcttgctgggggtcgggatttgatcttttagcgtagctaaaagttattaaagtgaatattctgaagtcaatttgtggtctgggctgtcatagacttccttgtctagcgtaccttcccgtttagctgagataacaccagccacgatactgtcattgacgtttaaggcagtacggcccatgtcaataaccggttcgatggagatcattagaccaatgatttccactggaaggccaagtgtaccgaagacaatgagggatgcaaaggttgccccgcccccaacaccggcaacaccgaaggaagagatagccactgtcacaatgatggtcacccaggtccatgggtttgataagtccatgccgacagctggtgcaataatggcaaccagcatggttgggtagatacctgcacaaccattttgcccgattgacaagccaaaggcactagagaagttggcattggcatcgtcgacacccatggcttctctttgggtttcgatattcattggcaaggcccctgcactagaccgggaagtaaaggtaaaggtgagtacctcacgggcatttctgaaataagtgatcgggttcaagccaaagagggctaggatcaagccgtggacaaggaacattgcgataatagcaacatagctggccactaagaaggtacccatattaatcaaagcattaatgcttgatgtggccaccatatcggtcatcaaggccaggataccaaatggtgccattcgaagaacaagggtcacaattcgcatgacaatggcatgcagggtttcgataaaacgttcaaaagtttccccttgttcaggctgcttacggctaacacctaagtaggcaatcccggttagggcagcgaaaatgacgacagcaataatactggttggacggctgttggcaaagtcttcaaagatgttggccggaatgaaactgacaatttgttcgggtagggtcaagtcagcaatttcagcttgtgactcttggacctcagcgatccgctccatttcagcagctccctgggtaaattctgccccatccaagttaaagaggatggtggtcaaaataccgatagctgaagcgatcataacagtcacaatcaagaaggttaaaacattaacactgatccggcctaagttggcactccccttaacttgggtgaaggcccggataagagacactaagatcaagggaacaacgactaattgcaagaaacggacatagccgttaccgacaatattgatccagtcaacaattgtttcagtggtcccactttcagccccaaggatcagctggattactccaccaaggacaatcccaagtcctaaagcaataaaagtccgcttggtatagctcacgtgattagcttgcatgcggtacaataagtataataatgctataaaaatagctaagaaaataactgtagccatgaaggccctcctttttacttactttttgtaataaattctactctaatagactacacccatggcctaaatttagcaaataatcagaccggttcttaccatttcttaatcaatgcctagggttttattatttaattgattaatattatttatacttcacccgacaaggtgtgcttcaccaacaaaataaaaaagctcccacaagtgtgagagctgaaccccacgaattttagttttcgtctgtgaggccgtattttttgttgaaacggtcgattcgaccatctgcttgggcgaatttttgtcgtccagtgtaaaaggggtgggaatcagcagaaatttcaacccgaataagagggtattcattgccatcttcccattcaactgtttcatctgaatgtttagttgaaccagttagaaatttaaaaccagtagtggtgtccataaagacaaccttgtggtaatctgggtggatatcttgtttcatctctttcactccttatgccatgaattctttgcgaaatcatagttctcatgtgatgactcttcagccaatccttttgcaacgaacctaatactagcatgttttagccaataatgcaatcacttttatggagcttttccatattattgggggaaattggtgtagaatctagcctagtaatgtgatttctagctaaagttagtcaaatagataaatggtcataaagctagactgctcagtcttccccctcttgcatataaacatctgcgcctaggtcattgagtttttcaacaatatgagagtagcctcttagaattttgtcaacgccagtaatttccgtctgaccttccgcgatcaaacctgcattaatcaagcaagccccggctcttaaatcactggcttccacttctgcccccttgagggggtggccaccttcaatgaggatgatatcgctttcgacccggatattggcccccatccgttccagctcagggatgtgcttaacccgtttaggatagatggtatcggtgataacggactcccctttggccagaagcaagagaggggtgatgggctgctggaggtcagtggcaaaaccagggtaaggcagggttttgatggtaacaggctgcaaaggtttactgggggctttcacccggatactgtcttcgccgatgtccaggtcaataccaatttcgtcgagtttggcaattaaactatcaatatgttcaactataacattgtttaccaggacatcctccccagctgccgctgcaatagccaggtaggtcccagcttcaatccggtcggggatgatggagtgctggcagccagtcagctggtcaaccccttcaatccggatcatatcagtgccagccccacgtattttagcccccatcttgttcaagagggtggcaacatcaataatttctggttctcgggccgcattctcaatgaccgtccgaccttgggccctaacagcggctaacatgatattaatggttgcaccaatcgaaacaacatctaagtaaatccgactacccactaggcctgaatcactggttttaaggtacatggcccccatttcattatccacatctgctccaagcaggcggaagcctttcaagtgttggtcgatgggtcgtggccccaggaagcaaccaccgggaagaccgactacccctttaccgaatttggccaagagggctcccataaagtagtaggaagcccgcaagctttggatcttaccacttggcatggggatagagaccatttctcttgggtcaatggtcaaagtgtttccgtcaaagtcggtcttgacattcatttcatttaaaatctccagtagggaatgaacatcctggatatcgggtaccccctctaggattaccgggctgtctgctaaaatagatgctggaatgagagccaccgtactatttttggcccctgataccgtgacttcacccttgagggtccggccaccgttgatgattagttttttcattatattcatccaatcttataggattcttggcaaaattgcccttcttatttacactgactcccttaaagtatattaaacaagactgtaaaatacaacaataattcagctcgaaacccagccatcgaaaaagtcagtctagccaagtctagactacaaaaaacacgaagccccaccttgaagtggagccccgtgcctagtctatcttttaagaaaatggtctagcctaagcttgctggcttgagccaaagatgtccattttttctttcgttacccgggtaatgtcttctttgcctgggccgataatcttacgtgggtcgtaaactttttcgtcttgggcaataacttgacgagtccgtttagtccatgcttgttggagttcagtgttgacattgattttactgtgaccgtattcgatcgcttgtttgatttggtaatccggaataccggagccaccgtggaggacaagaggggccttggttaattcagaaatttctttcatttcgtcaaagccaagttttggctccccatcgtaatcaccgtgaaccgaacccaaggcagcggctagagcatcgatgttggcttcttcgacaattcgcttacattcttcggggtcagcgtaaatgacaccgccagtgactccgtcttcagttccaccgactgcgccaacttccgcttccaccgatacccctttagcgtgggcatattccactacttttttggtgttttcgatgttttcgtcaattgggaacttggaattatcaatcatgactgagctaaatccagcatcgatcgctttttggcaggcttcaagggttgagccgtggtcaaggtggacagcaatcggaactgtaatttccatttcttcaagcaaggcatttactatgcccatgaccactttaaagccacccatgtatttggcagccccttccgatacgcctaagatagctggggactgggcttcttgggcagcttgcagaatagcctgggtccactctaggttgttgatattaaactggccgaccgcatagcctccctgcaaagctttgtttaacatgtctgtcatattgactaaaggactcatttcaagtttgcctcctattatctatttttacttaccaaggtcattgtatcaaatttacaaggagcaaactagctatttattagcccgagcttgtagcgaagcttcaataaacttggtgaagagggcttgaggccggttggggcgggaaacaaattcgggatgaaattgggtggccacgaagaagggatggtcggttatttcaatgatttcaaccaatttattgtctggtgaaaccccagaaatagtcaaaccgtggtcagttaagatttggcggtaggcattgttaaattcatagcggtggcggtggcgctcttggaccacatcgtcttggtaagctgctttagccacactgtcttcagccaatttacaagggtagagacccagacgcaaggtaccacccaagtcttccacctcgtgctggtcggccatcaagtcaataaccttgtggtcagcatccgggtccacttcagcagagttggccccagcaagtcctgcaacgtttctagcatattcaatggtcgccaattgcatgcccaggcaaatgcccaagaaaggaatcttgttttcccggatgtatttgatagcggtcaatttcccttccaagccccgagatccgaagccacccgggaccaccacgccgtcacattggtcaatggcctggatgatttggtcagccgtttgggtttcggagttgatccagtcaatttcgacatcggagtcaaaggcaaagccggcatgtttcaaggcttcattcactgacaagtaggcatcgggtaattcggcatatttaccaactaaggcaatcttaaccttgcgagacaagttttggactttttcttcgagctcaatccagttagacatgtcagcttcaggggcatcgattttcaggtgtcggactacaatttcatccaaaccttgctctttcaaccgtaaagggatggagtacaaggtatccacatcgatggattcaatcacagcttgaggttccacgtcagtaaacaaggccaacttgtccttgatggattggtcaatttcttgatcagaccggacaatcaagacattgggctggatccctaggctacgcagttctttgacactatgttgggttggtttggtcttcatttcccctgctgccttgagatagggaatgagggtggtgtggatatacatcacattatctgggccgacttctgacttcatttggcgtaaggcttctaagaaaggcaaggattcaatatccccaactgtcccgcctacttcagtgatcacaatatcagagtcagcggtccgacctgcccgcataattttatccttgatagcattggtaatgtggggaatgacttgaacggtggcccctaggtagtcccctcgtctttccttggccaatacttcagaatagaccttgccagtggtcacattggaatagcggtttaagttaatatcgataaagcgttcatagtggcctaggtctaggtcagtttcggccccatcatcagttacgaaaacttccccatgctggtaaggactcatggtgcccgggtcgacatttatgtaagggtcaaatttttgaatggttattttcaagccccggttcttgagcaagcgccccaatgaagcagccgcaatccctttaccgattgacgaaacgacaccaccggttacaaaaatatattttgtcacaattatgcctccttaagaattcaaaacaagaaagccccctaccatcatagtagggagcttggttatagtcgaagttagtctctttttatagagagcccaagcattagtttaaagatgaaatcggcatccgtcaagtcttttatttgccattactcatcgtcatcatttgttaagacatcttcgtcgtcaacaatggacagcttgtcttggctagccttacgatcatcttcgaggtcttcgatatcgctagagtattcatccagcttgtcttcatctccatcgtcggtgatttcatctggagcaacattttcttcatcttcattgacggcctggtcatctaattcttcttttgcgtcatccatcacttctttttcgacatgctctaagtcatcaaagccgtcttccgcctgcttgggtgtgaccttctccaggtcattgtcgtgggtcaactcttcatcgatagaatcgactggataccattcacgtaagccccaatggttgtcgcctaaagagatgaagcgaccgtcaatatttaaatcggtgtaaaattggcccataccgctttcgatctcgtcatctgacaagtctagatattcagacacttcactcaagaggtcgttgaagtgcatcaagtcatggacctggtctaaaatggccttggccacatcaatcatggctagttcttcttttttctttccatcaaactcttttaattccacatctgacttcctttcacgattcaagtcttgtctatgcaaaagctaaccggctaagtggtaaagttgaactggatttggtagtcgcctaatttttgtccattcatttcaagtctgtatgaaatatcgacttgaccagaaaaaggtttttcatggtaggcaatatccaaagaccgggtctctaccttaatttcagcaggaccggctggggtatttaacttggtgtaggtggcttggtcactgtcaaagacaaggttggtcttgtgctggtcaccaaaccgggtcaagtgaactcggttgtcgcttgtgattttaaccataacaggcactttgccatcgtcatagctttcttcaaagcggatgtaatagtgaccattcatttcaacaaaacgtcccatctcttcaaaaatatgttggttaatgtcgccagcttgactggtctctgttttcatcacaatctctgctggcacaccatttttttctttctcgtccataccatcacctctttactcttgagactaccgagttattttaccacaagttagggtaaaaacctagtcaaagactggccctttaagccaagaagagagcttagcgccatattaatgaagacttatttttggtataatggcaaggagattatatagaaaaggaatttgatatgaatacaagctatccctggataaaacaaagctattccatctaccatgcccagcaatttcctggcgaaaccaaccccttgacctacttttccttgactgacgccctgatccaccatgcggccaatacggaagagcccatgctctacttctggccgacagaaaaattggtctttttaggcatgatcgacaccaaaatgccttatattgaagatgcacttgaagttttaaaagaccacaactaccgctacgtctcccgtaattctggtggcctcgccgtggtcagtgaccccggcatcttaaatttttctatgattttccctgaagaaggcaagcaaaggctcaaaatcaatgacgcctatgaacggatgcatgccttggtgtccgaaactttcaaggactacaatattgacatccaagccaaggaaattccaaactcctactgtccaggcgactatgacctgtccattaatggtaggaagattgcgggcatttcccaaagacgggtcaagggcgggtccgccattatgatttacatcggtatcaatggtgaccaagatgagcggtcctacctgatcaaggacttctatgaccaggggattaagggccaagaagtcaagtgggattatcccgatatcgaccccaaagtcatgaccaccgtctcccaagaattaggctttgagatcagtgtcgaccaggtaattgacctcatcatccaggtctttgaaacacacggccaggtcaagcagggcccttacaccgaggacatcatcgtcaactaccaggatgaataccaaaaaatgatccgccgcaaccaaaaactactaggccccctatttaaggaaggagtggacgagggatgaatactgacacatttgaagaaagcaaccggctggcttatgagaaggtctttcgggacccggtccacgaccatgtccatgtcaaccaccagctgatcttggaccttatcaatgccaaggaattccagcgtctacgccgaattaaacagttagggacctctcagtataccttccatggggctgaacactcccgcttttcccattctttaggcgtttacgaattggcccggaagatcatcaacaacttcaaccgtcgctacaatggcgactgggatgacagcttccgcctggtcaccctgtgtgcggccctcttgcacgatattggacacggccctttctcccatacctttgagaaaatcttccagactaaccacgaaaaattaacgactgatattatcctccaggaaggaacggaagtcaaccagatcttaagaagtgtttctcaagacttccccaaccaggtagccagtgtgatcacccaagaccaccccaacccccaagtggtccaattgatttcgagtcaaattgatgctgaccggatggactacctcctccgcgatgcctactatactggggcgacttatgggtcttttgacctgtctcggatcatgcgggttatgcggccatatagccaggggatcgcctttgacatctccggtatgcatgctgtggaagactatatcctctgccgctaccaaatgtacatgcaggtctacttccaccccgtctcccgggggatggaagttaccctagaccgcttactcaaacgggccaaggacctttatattgaaggggaattgcaaagccctaccccccacctggctcccttttttgaagggaactttaacctgaacgactacttgaaactagatgacggggtcctcctgaccgccatttccatgtggactgaggaccaagacccctatctcaaggaactagcccagatgtttctcaaccgccatcctttgaaatccattgaatacaatcccgataccgacatggccacggtggaccatctgagggacttggttagccaggccagctacgaccgagacctcttcaccgccttgaaccggtcactggacatttcctatgactataaattgaagaaaaaagcccctatcctcctctacctatcggacaatgacctgtctgagttaggcgaacaatcgaaaattgcccatattttaagtgacaatatccatggagactaccggctctatgtcccccgggaatttgtcaagccgtccgattttgaaactatgggcatcttttctgacttgtaccgggaatttagccggtatgtgtctaagggtaaaatcgttcgccaatacaagggaaaaagctaggcaagagatcagcagcctgaccactagtagcagaaagaataaaagacctaaggccaagtctagggattaaaaagttcccaacactcacctactacagcaatacaaataagtatgcaccaacctacacctatgagtcgataaacactagaattaggaggaaagtatgataaaactaattgccatcgacattgacggaaccctttataattcccaaaaagaggtcagccctgccaacctaaaagctgtccaaaaggccttacaggctggcatcaaaatcgtcctatgcacgggccgccccaccccggcagccattcaagcaacccggaccttgggcttgtatggccatgacaactacttgatcacctaccatggggccgtaaccagccaattgaaagacctcagccggacccggtccctccctctctatgaggaccaaatcaagcaattgtttgacctggcccaggaccaaaatatatacgccttttcccaaaaggatactgccatccaggctctggacgactcagccccagacctagccaagtacgaagctgaattggtcggcctgcccattgaggttagctcaagacaagacttgacccaggcagataagtttatgatggtagcgccggctgacaagctagaccaagtcacccaaaacttgacgccaaacctctataaccactacaccattttgcggagcgaaccccgctttattgaatttattcacaaagattctgacaaggggagtgccacagcccaactagcaaaccagctcgacatccccatgtctgacgtcatggggattggtgacggtggcaacgacctccaattaattgaccaggcaggacttggagtagccatgggaaatgcggtccaagacctcaaagacaaggctgattacgtcactgcaagcaatgaccaggatggcttggcccaggctcttgaaaaatttgttttttagctagtagccattgatttttaagccccaacgggtacaatttatatagattaaaaataaggagtttttaaatggaagagcgattggagaccaagtcagatttcatcaaaaaagtagccgcctcgacccgaaagaaggaagaactcttcgaccaaagtaaggcccactattttgtccgagccatgtatgcgggagctatgctggtttttgctacagctggtggcgcatatgcagcagatgccttgaacaaaatcaaccctaacctaggcaagtttggctttgcttttatctttgcttttggtctggtttggattttatacttacaccatgaattggtcgacctcgaatatgatgtacttaacagcttcttgctatcacaagattattacgcctcccaaagcactctctatccttcttttttgtaccctgggagatatagctggggcagttctggttggtcttttgattggcaataccagtcctttccaagccttgacagccgattcctttatcttgacggtcttggatggcaagctaaccaaggaagttggcctcatctttttagaagccattgccgctaatatctttgttaacattgccatcctgggctttatcttaaccaagtcagaaatggccaaaatttttatggtcttgaccgctattttcctcttcgtttacttgtcttacgaacacgtggtcgccaactttgctattaccggcattgcctggtttaccaatgttggcgtctcctactccctaggccatatcctcttcacttggctggtggcctggctgggtaactatgtaggcggggggctgatcatggggcttgtttacggctggtacaacgatgaccagttaagctaccgtgactaattgaagtttgaatgaaccccatccaaaaactggatggggtttttgcatggtcaaagagctatggtttgcccaccaagcccttgcttgagcctaggacttgtttcaagcctttcgactctttctccaactctggcctatcttggaaaacctattatcactggatataaaaaggccatggccttgtccagccatggtcttaactctttacagctcactaatcaataattcttgaactggaaggtcgtacttgtcagtgggcaagtggtcggttaactgaccttgccagaccagggagatggtcgggttgtcaaatttggccaggtagcggtcataaaaacccccaccaaagccgatccggtaaccctctggcgtaaagacccggcctgggaccaccaataagtcaatttcctcaggtgctaaagactgggtttggtctgggtctggttctgaaatgccggcaaaacctgcttcaacctggtcaaaggaatcaatttggcggaagtccatttggctaccttctttaatcgccttgggtaccgccaccttcttgccttccttccaggcttgctcaataatcggacgtgtctcccattctaggccatccgacatggtcaagccaatgactgaagcttgttgccatttttttgtttggaccagctgattaaaaaggtcctgggagatagcctgatggtcttcccgcgataagttttttatttttttggtgacttcctgtctgatttggtctttgtccatcatttccactccttatccaaatcttttacaagctaatgatagctcaactttctattgacaacaagctagacccccttaagctatgggctaagtctcaccagaagtaatctagtgaagggggcaaacaccgcaaagtcatagattaatctccaaacaagtaaggggctttggccctttactttaatatggtaaaatacaggggtataaggagggaaataaatgaaaattctagaccgtttagccttattgatacttatcttagctggcatccatctcttgctaattggcttgttgagctttaatgtttttgaagaattctttggagagtacaaccaaaatataaccgatattatctacatcattgtcggtattgctgccttgtggtgtatcaaatacttcacttatactcctaaaggtgggtctcggctgaagggccggtgacggcctcgtccaaccaccaaggcgtcaagtttaacttggcgcttttttgtgtcaaaaatccagcctatcttaatgagaatggtcgcggtaattcttactgaatacttaatggcctttaaagaccatgttctaactgggtgctactatggacttgtaggtgttgagatataattcccccttacaaattgtactcaacattcttatatgacataactgaaaacaccgactcttccccggggttggtgttttttgttgtggtagataaccaaattggtgtagcaaaagcagtgaatagcagatgtcttaggtctccctccttaatttgccgcctctaggtccatcctttcaaaattcaccttttctttacttttccatcacacattattcatagacttcccctataataaaaccatacccacataagcaatacccgttttattacaccccatgtaataagacaactccttttccacctatcttaccccaaggataggtggttttttcttttacaggtcgcctaatttagtaaaagataaacaaaatacaattttgtttttatcttcctttttttataacagacaaaaggccttaaccatgggcctggttaagggcggatttaataacgtttacattttttaaccccaaacaagaccaatctttcaaacttattagacaaggacaggagagggttctatactatttacgaaaagatttttgccaaggaggaatactgtgatccaatttgaatccgtctccaaaaaatttgagcgtgctagtaaggagaccctggccctgtcggatgttaacttgaccatccagtcccaggaatgctttggcgtgatcggtgaaagtggggccggcaagtctaccctactgcggatgatcaatgccttggaatacccaacttccggtcatgtccttgttgacggagtaaaagttggggacctagccggcaagcaactccagcgtcaccggagtgaaattggcatggttttccagcaattcaacttactcaacaacaagaccatccaagaaaatattaccttgccactagaattacataagcaccaagaagtcttggaggttgaccatgtcttagactttgtcgggctcactgacaagcgggatgcctatcctgctgaattgtccggaggccaaaagcagagagtggggattgcccgggccctgattaccaagcccaagatcctcttgtgtgatgaaccaacctcggccttggaccagttgaccactgatgaaattgtccagctcctgaaacgggccaaccaagaatttgaaatgaccatcctagtggtgacccacgaactggaagtggtcaagcaactttgtgaccggtcagccgtcatggaagaaggaaaagtggtttccatccttgatgtgaagaaaagggataatccctaccaggatatggactacaagacacgggcaagtgaggtgctacaagcatgattaccctactagctacaacagatgagccttatttggaacgtctggtggattttatgccagaaattatccaaagtttaatcgatactggcattatgatggtctttgccatggccgctgctatcttgctcggtctccccttaggaaccctcctctttttgacctccgatggcaaaccacgggaaaacaaggtcatcaacaacattgccaacacctttgtcaacattatccgggccttccctttcctcttactggtggtggccatgcttcccttaatccgccgcttttacggccgggcaacgggagaccctgtggcagcctcctttcccatgatgctcatttccctggccctctacgcccggtttgtggaacagtccttgcttgacgtgccgaccggggtcattgaactagccgaagccatgggagcttcaacctcccaactggtcttcaaattcctctacgttgaagcccggtcttccttgattatcggctttacgaccgccttagttagttttgtttcttactccaccatcatgggggtggtcggtggcggagggattggggacttcgccatccgctacggttaccaaaggtttgaaacggacattatgtataccgccatcgtcattattattgtcctggtggaaatcgcccaatggttgggcctcaaactcgctagaaaatttgataaaaaataatacaaaaaggagtattacgatggaacttagacaaggattactgaagaaattgggcatggttactgctgctagcctggtcctcgttgcttgcaacgataacggtggccaagaagcagaccctacccaggaaagtgaagaaaacactggccaaactgacgatcaagcagaagaccaaaatgacagtcaagatgatacagataaccagggtgaagctgacaaccaagaagatgaccaagctgaagacacggctagcgacatcccagaagactttaacttctccatcgctagccacactacccccatggtcgatgtcgtcgaactcgccattgaagagctagaagaccaaagcttccaaggggaattggtcccagtcaatgacaacatccaatacaatgaagctgtcttaaacgatgaggcctttgctagctttgcccaacacgaaccttttatggaaatttttaacgaagaaagagatggagacttggtggcgatccaaaaaatctacaatgccatcgttggcttctactctcccaactacgactccatcgatgacttggaagaaggggctgaagttgtgattgccggtgacatggctaacactgcccggtcactcttcatccttgaacagcacgacctgattaccctggatgatgaggaagagttattcccaagcctggataacattgaagataacccctatgacctccagttcgttgaactcgaagtatccaatacagcccaaggttacctagacggctatgacctagtctttgcctatccgacctttattgaacaggctgctgggttaaccccagatgatgccttgattctagaagaagacccggacaacctttttgccatctcagtcgttgtcagagaagaaaatgccaacacaccggaagctgaaaaactcaaacaagcctttacttctgaccgtgtgactgaatttttagatgacctagctgaagagggccaccttgaacgggcctactaacacttaatcttgttaactaccccttcccaaagcctggttgaccaggctttgggattttgtgttttttagccccggttgtccccaatgacttgcttcagttgctaagagtgagaaagccttgttacaaatttcattttatttgctacaatagaggtaagatatcgttaagagagagggattgcattgacaagtaatgttgctgtgattggtggaggcattgtcggagcaagtgccgccttctacctcagcaaagacccaggaattgacctcacgctttttgaccagggacagggccagggaaccagggctgcagctggtattatcagcccctggctttcccgccggcggaacaaaaaatggtaccggatggtcaaggaagctgccgccttctatcccgactttatgcaagaagtgagccaaggcaagcgaattccccagtcggtctacaagcaggtcggtaccctcttgttcaagtctaagccggaatacctggaggaaatgttagaaattggtctcaagcggcgggaaaaggctccagaaatcggcgagctcaagatcttaagtccccaagacattcgtgacttagtgcccatctatgacaaaaaagccggggctctctgggcttcaggtggggccaaggtggacggcagtcacttggttgacctccttttggataaaataaaagaccagggaggccaaatcatccaggaaaaagtccaaatcaaaagccgaactgccccttaccacctatttagcccaaacttttctggtcattttgacaagctagtcttggccaatgccgcctggttgaaggaaagcctggaacccctgggctaccaagttgatgtccgggcccaaaaaggccaacttgctgaactccaacttgaccaggctacttcgacctggcccgttgtcatgccagaaggagaaagtgacatcatcccctttgacaatggccaagtcatcgtaggagccagccatgaagatgacatgggctttaacttggatttagacaggagcctagtgctccggatggtcgatgcggctcagggagttttttcgaatcgcttgtcccgggaccgggttgtcaactaccgggtcgggacccgggcctacacacctgactacgcccccttcttcggtccagttcctggcttggacggggtggtggccgcttctggtctagggtcaactggtctcaccgcagggcctctggtcggcaaaatcctttaccaattgattacccaccaaaatcctagcctccccattgaagactatccagttagtcgctacatccatgccttagactaagaagtctggtttgagttaggctaagcaatcacgtataatcaaagagactgaagtggaggttatgacatgctaacggaccaacaaggaaaatacatcggctacctagctattgccctgtccatcatcggcttctttatttgggggattccgctggggattattgccatgatcttaagtgccatcggggtatggcagtccgacattaaagggcttaactggaactccctagccctaggatcaatttgcgttattattgcccttatatagaaatagaagcaagccagttaggaaaagctaactggcttgctttttgcttaaagtttcttgttagttaaatgatcacttctactccgtaatggtcactaactaccgacccgttttgtccatcaaaaacaagacgatgagttttgggaatggttgaccggtcagttaaaactaggtctatccgcttagccccgtccttcccttcccaaccatcgattgccccttgtacagtcgcctggccgagaacctggtcagcagaatagtaactatccagtaaatccggtctttggtcaaagatatagtcatagccttcattggatacatccgcactattattaaagtcacctacgactatcaacttaccgtctttcactaggtgattagatagtttgtcccattcttttttaaaatacggaactccttctcgctcccaccaagataagtggacattaaaaaagtgatagtcttcacctccgaccgtaaccaaggccttgagtccgacccgtctggtaaattgacgatagtccttatcttccgaaagcaaatagctacttgctttaaatttatttttagcaagaatagccaaaccctcatcatacttgccgtagccaatatggcttggaatccaggaataaaaatagtggtgacccccggtctattagccggctcactaaaatataggcaaaattactagccttgagtggaattttaggactaaccatgtcagcttcaatatatcttcggtcttcaaccgatgggtcatctaaggcttgattaacttcttggaaggcaagtaagtcataaccttcctccacaattttattcactaagacttctatcttgtctgcttgttgatcttctaaccaagaatgagtatttaaagttaaaattttcaagctgccaccctccagttacaataattcatcaaagaattccctaaccttcggaacttccatccctacaactatttgaataccagaaccatttctaacgacaccgtgagctccagctgctttgaagaattgatcatcttcaactatactttcgtccttgacaattaaacgtagacgggagacacagttggtcacttccttaatattttctttaccacctaagcctcttaaaaattggatggctttttcctggttaggattggttttttgtttttccctataatcagatttgctatacattctgactgcttcaccatctaattcacgtccaggtgttttgatatcgaaccgcaagatggcaaaacgaaagaccgcaaagtagatcaagataaaaacgagtccggccccatagtagattaaaagggagtccaggtggttattaattaaaggcaaagcaaagccactgatgtgaccaattaagcccccaccaatattcccagccacacccaaactataaatggtcatggcaaaggtcgctgtaagcaaggcatggaccaaaaacaattgaggagccaagaacaagaaagtaaattcaaagggttcggtaatccccgttaagatagctgttagagctgttgggataattaaagcaagggtttgcttccgtctttctggtttagctgtggctacaaaagccgccccaatgccaattgggtagaagagtttggaggcattttggaaaaagaatcccccagcagggaagatttgcctcaatggtccttcaaaggaggcaatttcgggaagcatttcaaaccaacgtgccactaaacctccctccacaactgccggcccaaattcaaagggttggtaaataaagtggtggagaccagttggaattaaaattttctccaaaaatacatagattccgactccaagggtgccacttgtagccatgaccccttgcagttggaaaatgagttcttgaatcggaggccaaatgactgctgtcaaataagcaaggggaagggccaaaaagaaacccagtatgacaacaaaggaggagccaaaaaagattcccagccattctggtaagggagtatcaaagaagtggttatgtagccaaatagctacagctgaaattaaaatagctccaatgatatttgtatctaaggtcaccacgcctgcaatttctttgacaccaataccctccgcatccgttaggtcgacaccaaagttccatgtcgtcatcatagcgttgataaaggtgttccaagtcatgtatatgacaaaggcttctaatgcagcccgagcttgtgcttttttagctagtcctattggtaaaccgaggacaaataggatctccatgtggttgaaaacaacccaaccaccttgttcgattacactccaaatattattccaaaaagttccttcattagcaattgaccctaatatatcaggattttggaaggcaatagacaaggctagcattaacccgttaaaggcaaacagtaataccggggtaatcatagcgcctccaaaacgttgaattttctgcatcatttgtcttgctcctttctaatgttgggaaattcaattagcatcttcattttgcagcctaaccaaccgcgcctcataaggtctgagttgtctgatttgcttaccttcctcaattggataattggctaagacagtaaagtctagctggtagtcactgaggtcgacttggcttggattatcaaacaggttaaccacaacgaggaaagtttcttcctccccccggcggaggtaggcataaacttctggatggtcaggtaaaatcaattcatacgacccataaataagggcctgggacgctcggcggacctggatcatttttttatagtagtggtaaatcgaatctgggtcagacatagaactagctacattaatatttgtatagttttcattaaccttgagccagggttggcctgatgtaaagccagcatgcttagtctggtcccactgcataggtgtccggacattatcacgagaattctgccacatatatgccatggcttcctctagactagccccttcatggtccatcatatacttggcccggttaactgattggatatcgtcatagtcctcaagccggtcgaagtgggcattggtcattccaatttcttgaccttggtaaatataaggggttccctgcatgaagaagtacatggttgccagggccttggcagatttttcgcggaggtccccttcatctcccatagctgaagtggcccggactaggtcatggttttcaatatacaaggcattccaacccataccttccagacctttttgccatttggtcataactcttttatagtcccttaagtcaaagtcacctgcttggctaccccataaatcaagggcttcgaattgaaagatcatatcaaaatggccatggtcttctcctacccattctgctgcatcttcaacagctactccattagcttctcctactgtcataatgtcatagtggtcgaaagtagcctggcgaaattcagtcaggaagtcattaatacccggctggttcatatgtccatcaaaagacggaacaacttccttgttatcgggattgggcatgtccggtaggcctggagctttcttgatatggctaatggcatccacgcgaaaaccatcaattcccttgtctagccaccaattggtcatttcttgcaggtctctacgaacttttggattttcccagtttaaatccggttgttttttagaaaaaacatgaaggtagtattcttgactctggtcatcccactcccaggctggtccactaaagatggactcccagttatttggccgaccgccgtcctcactagccggtcgccaaatataataatcacgataaggattgtcttttgaggaccgggattcgataaaccaaggatgttcatcagaagtatggttcatcacaatgtccatcagcaatttcatacctcgttggtggacctggtcaatcaagtcatccaagtctgccatggttccaaactcggctaagatggacttgtagtcactaatatcataaccattatcatccattggagactggtaaacggggcatatccagatcacatctattcctagatcttctaagtaatctaatttttgaataattccttgaatatcgccgatcccatccccattggagtctttgaaagaccgggggtagatttggtaaacaacggcttccttccaccacttttgtgccatatactctcctcttttctactgtctcatctttttcacaatttatcatatcatgaaatcgattccattcaatcctcttcttaggtgttaccggtaacaaaataaacaagccctagaagttagcttttgaacagcaacttctagggcttgtttacttggtcgttcctcccaagcgaagtttggttgggaaaaggagcttgtgctggctaggtttgtccagcttaattttccccataagtaagttggcacaggccgctcccatttctttaatatcctgcttcatcgttgtcaacttgggataagttatttggtctagaaagacaccgtcatgacctgttaccccataatcactaggaattatttccccgcgaatttgcaaagcccgaacgactcctaaggccagacggtctgaagcgcagatgaaggcagttcctggctggaaataactggcctggtccattaagtattcaaaaatggcatccgaatcgttggtaaaggtcaaaatcctaggctgttttttcaattgagtcatcactgcctgatagccttcccgtcgactccttgaaaagggttcatcaatagccatatcgatataaaccaaattttggtagccaacttgctggcagtagtttgtaacctgggcaatgccctctttattattggaatcgacatagtcatagccatgcttattttcaccaaataagaccactggcttgtcaagtcggtcaatttcaggggaaatcagcttcccgcatgccacaaataatataaccatcgctatttcccaagtttttactatcacgggtcaaaatttgtaaaccatatgcgtgtcggtctaactccatggcaataccagttaataaagccatataatagggttctactgaatccgtatcttctaagatcattagcttaatcatttggctttgctggttcactagggctcgggccaagcggtttggttggtagtttaagtcggccatagcctggtacaccaagcttttcaattcgtcagacacctggtctgggtggttcaatactcgggaaacagtcattttagaaacaatggccaatttggcaacatcggctagagtagccaccactatcacctcgcattttttacctatccagctgtcccgtccataatctcctggacccggttttttaaaactggcaccacttctttttcgaaccaaggattcttggccagccagcccatgtttaagggggatgggtggacaaggggcaagtagcttggtaggtagtcttggtagttcttgaccgtttctgtcaggttccgtttccggtcttttcccaaataaaattcttgggcatggctccccactaacacaatggttttgacttggggcatctgtttcaaaattttggggtgccatttcttggcaaaggccttgcggggaggtttgtctccagttttggccttgccaggatagtaaaagtccatgggaaggtggacaatctggtcggtttgataaaatcggtcccggctaattcccatccactcacggagtcggtccccactgaggtcattccaaaagagccggcttgcctcggccttcttgcctggtgcttgaccgacgatgaccatcttgacctcttttgaagcgctgaagaggggttcaattcctttgtcagtgtagtcctgattcatgggatcagccataatttcttgttttaactcatcaaaaatggacatgtttagcctccttgccccacattataacctaagtctggctttaatggtacagagtcacctaaaccagattcaaacttcccattgtacattttcttagccggacccagctgcaggcttgttcctgaagttaaaacccagcgaatcccccataaaaaacacctgtaaggctaagccttacaggtgaacttgacttttttgaaggagagtcaagtcgtttagtcaattagcccaagactggaaagtcaagcgctagattcactataggatttacttttgcctagctttctgactaggccttttttaggggagaaaaccatcgtaagcatggtggttacccctataaccaccgcaatcatgccggcaaaggtggtgtcaaattggtaggctaagtagacaccgatgacactgttgaggacggagaagaccatggccaagccaataatgtgcttgaggtcatccgatagcatgtaaccggccaaggctgggccaaccacgaaaccaacaaccaagactgacccaaccgcttcataagacccaactgctgttagagaaaccaaggtcatcaaagcataataatacttgcttggtgaaatcccgatagaccgggcaaagcctgggtcgaaggtagtaatttttagttgccggtaaaagatggtcacaaataagatattgatcacaagaatgatagacatccgaaccaaggcaactggtccaaggtctaccccattaataatcaaacgattgaagggggcaaagcctaactcacccatcaaaacagcatccacgtctaagtgggtaccgctagcatactgggttaggaggataatggctaagccgaagaggaaggggaagacaaccccgatcgctccatcgtagttgattaacttggacttgctgaccaattcaatcaaccagactgttaaaagaccaaccaaagtagcccctagcatcagaaaaggcgagtctaagtcatgaacgacaaagtaggctaggacaatccccaacaaaaccgtgtgggtaatggcatctgataccatagctgctcccctgaggactaagaaagttcctaagagactagaagccatggaaacaacaatggcaattaaaatcatagggaatagataactcatcgatcagccacctcccgttttatttttcgttgctgttttcgtcgtctgagggtttgactgatcagaccatttttaggggcaataaataaactggcaaataagatcaagctgaggacgaccacaatggctggtcctgtcggtatccgtccagccgtggaggaaatataggttccgataaaactggacacagccccaaaaactccggctaggataacaaggggaagcaagcgatcagtccactggcgagcagctatcgatggccccactaagagggctgacattaagataaccccaacagactccaaaccgatcataatggctgcgacaattaacagagccatggtaaagttataccatttaatatttggataaatggactgggcatattgttggtcaaaggtgatcagcttaaagggataccagcacagggctatcacgagtaaaataatggctgaaacaaggataatcatccagacatcactacgtaacatggcactggcctgaccaaaaacaaagctggagagaccggcctggttggcattttcttggccttggatggcggtcagaaagaccaaacccaagccaaagaaagaggataaaatcaaggccatggacccatccagtttgacaggtaacttattggtaaaaaactggatcaggaaaatagcaattaaaccagtcaccaaagcccctagcaataagagaggggtgattttaacttgaatcaagataaaggctaggccaatacctggcaaggctgcgtggctcaaggcatcccccatcaaactttcccgtcttagggtagcaaatgacccgactactccagtagctatgcctaggactactgtccctaaggcaacgatttgaaaggtatagtcactaaggacctggctcataaaggaccaatctaaaattccgctcattcataacccttctctacttcttggccagaccgaaatgtccggtcaactgtttcgtcattaaaaatgtcggccactggtccactggcaaagatttttttgttcaagaaaacgatctggtcaaagtatgcttccaccgtatggaggtcgtggtggaccactaccacggtcttgccttcccgggtcaattgaccaaggaggtccatgataattttttcggtttttttatccacccctgccaagggttcatctagcaagtatatttctgcctcagcagctagggcccgggctagaaagatacgctgtttttgaccaccagacaattggttgatctggcggtcagcatagtctaacatttctactgcccttagtttatcccgagcgatggttcggtcctctttggacaaacggctaaaaagacccagtttgccatagcgtcccattaagacaacatccataaccgtggccggaaattgccagtccacagcttgtttttgcgggacgtaggtaacttggtcccgggcctgattatagctgagaccgtcaaagaaggtcacctgaccgtttaatggggtcaagaagcctaaaatactatctaagagagttgacttaccagctccatttggccctacaatagctgtcatctgacctttcttaaaggtcacattattatccactaaaactggagtttggtcgtaggctacagttaattgatctacttttatagcaacgtcgttttcttctgtcattctaaccactcctatttgagggcatcaacaatagtatcaatatttgccttgtacatgtcaatatagttgccagccccatcttcgtcactaccaagggcatctgaataaagttcgcccccaatttctaagttcccgcctctggactcaacagcttcaaccaaggcagaaacgttacggtcagacacggaactttcaataaagacggccttgatattgttttcgacaataaagtcagccaagtcagcgatatcgcctgtccccgcttctgttttggtgttcaagccttggatcccaaccacttcaaagtcgaagtcttcaccaaagtagttaaaggcatcgtgggctgtgatcaggtagcgggattcttccggtacttcttcaattctactattaatgtaatcatccaattcatctaactcagccaggtaattttcggcattagcctggtagtccgcttcattggcagggtctaggttactgaggtaatcggctgtatgctgggcaatatcacgccagttttccacactaaaccagatatgagggtcatgggccaagtcatcttcatcagaggctaagatttgatcctctgacaaggcatctgccaagatcaaagtatctttgcccatctcatcgagagattcaaaaaccgagtcaaacatcccttctaggtgcaagccgttataagctacgacttccgcgttttgcaaggcctccacatcggcagatgaaggttggtactcgtgagggtctacaccaggtcccatcaaggcttcaacttcaatgtggtcaccaccaatttgggtgacgatatctttggcgtgagtggtcgtcgccacaaagttaatggggtcaccaccattttcgcttgcttggtcattggcttggcttcctccttctgcctgattgccacaggcggtcaggaggaaggcgactaaggtcatcagtaatattttcatagcattcatcccttcttttgttataattgataatatattttataatgctatcagttgatttttagtctatcctaaaacatacgctatgtcaatacttgaatttcaatttcttaaaaatccatgtataatagataacgctaaggaggatggtgattctttgaccccgaacaaagagaattttatcaaggcaatctacgagttgaacggtgaccaagaaattgtgaccaaccgccaactggttgaaattttagaggtatcagctgcctccataaccgaaatgaatgcccgcttggtggccgaagatattatagaaagttacccttataagggggtccaactcacagacaagggcttggccatcgccaaacaattgatccgcaagcaccgtttgtgggaggtcttcttatatgaaaagttaggctaccagtggcatgaacttcaccaagatgcggaccttttggaacatgtttcttccgacttattgatcaaccgcttggacgactacctcaaccacccagaaatagaccctcatggtgcctttattcctgaccaggcggggcaggtcgacccaagcgaatatgtccggttaaacacttgccgggtaggtgatgaaatcaccatcaaacaagtcgaagatgaccgggctctcttaagctacctaacccaaaaagaagtccaactaaacaagcaatacttagtagctgatatccaggcctttgacggggccatcacccttaaagatgaccaaggagtcaaaaccatccttagtcccaacgcagtcaaccatatctatatcagtaaaaaagacaagtaggtctgaccggaagcaaaaactttttggtccagataagcttaaaccaagccttttgcaagggatagaccagtggagaaaggagttttattatggcaagaagaggtcgtggcatggggggcggccgaggcggtccccgcatgggcggaggacgggctggtggtttcagacaaggtgtcggcggtggtcgaggacgaagtggccgtggtggcggtcctaataaaggaggctatagacctagacctggctactcgagaccgagaggtggctttggttttggctccttcttacctggcttcctcttagggtccatgactggcggacgccgccgctactatggaccaggcgggggctgcggtggctgtggcaacggcttagggtgtggtctctttgtcctcctcctctttatcttggccatcacccttctcaataactccgacaaccccaactttgacttcaaccaagctgaaccccaagtccaagttagggattcaactattgatcgagaccccattccagaaggtttggttaacgaaacagactattataccgaccaggtcaactggataaccaatcccgatgaattgacagagggcatggaggttttctatgaccttaccaatatccagccccacctctacttgactgacgagatcgacggggagaccaatccagaatttcaagaaatccaaaactttacccaggacctctacgaccagctctttacggatgaagcccacctccttctggtttttttcgagggagacaattatgaacgaggcgttagctaccacacggcggtcgggtctgaggcccacaaaatatttggcgacgaagcccagggaatcttgtttgactacttagactattactactattccgattttagcgaagaagactacttttctaccgtctttgaaaagaccggccaagacatgatggatgtttcacctagtatctttaccagtgattcttctgaaacccaaataagctggccccggattatcttcggtgtcctcatcgtcttattggtcatcggtttgattatctatttcttcaaccgtcggcaaaaaaaccaggaagctgaaatcattgagcctgaagacgatgacgatttacatttttaaaacaaatgaatacctttccccctttacaactgcgcctcacaattaaaggtccagtttattggaggggtttttcttataaataatccgtatagcatcaagtcagcttctaaccagctaatgcgttagaatagttagataaagaggtgaaagtatgattacatttgaccaggtgtccaagatctatggtgacacggcagttgtcaaggacttgaccctaaccattgaaacgggtgaaatttttgtctttattggacctagtggtagtggtaaaacaactagtcttaaaatgatcaacaagctgatagaaaattccaaaggggatattctgatagacggcaagcctcatagccagtatgacctgcatgaactccgctggaatatcggctatgtcctccagcaaattgccctcttccccaatatgacggtggaggaaaatatcgccctggtccccgaaatgaaggaatgggacaaagaaagtatagaccaacgaattaacgaattactcatcatggtcaacctagaccctaaagactaccggaaacggtccgtatctgacttgtctggaggccagcagcaaagaattggtgtcttacgggccctggcagccaacccagatatcctactcatggatgaacctttctcagccttagaccctttaagccgggccaagttacaagatgagcttttagccatccaaggccagctacataagaccattgtctttgttacccacgacattcaagaagccctcaaattgggcgaccgaatttgcatcatgaaagacggccaggtggaacaaatcggaacacctgaccaaatcctaaaccagcccgagtcagacttcgtcaaaaactttgtcaaaactggcttgccaacctatcctgaccaagaccacattgaccaggtgattgcgggtggtttttatagtaaagtaagcaagaacttagagggcagctcaagcttacaagcagaccaagaaacccatgcccttttacaggccttaagccaaaaagattcagtttatgttttacaccaagggcaaagctacctcatcagccaaacagattatctccaatacctcagtaaaaaaccaggtctagggggtagaggcaaatgaatttcttagacaacttaatcgaaacctttgacatgcgcagtggccaactctgggagtccttattagaacatatccagttgtcctttatctcccttgccctggccgttatcattgctgttcctttggggatttacttgatggatcggaaaaaaattgccgagcccatcatccaagtcaccgggatcttccaaaccatcccttccctggccctcttaggtcttctcattccacttttggggattggcttctttccagcagtggtagctttaacggtctacgccctcctgcccatcctccgcaatacctataccggtctaaccgaaattgacgactccctcctagaggcagccgatgccatgggaatggaccggtcccggaagcttaaaaaagtccaactcccccttgccatgcccgttatcatggccggcatccggacagccaccgtcttaatcatcggaacagctactgttgctgccctaatcggggctgggggtttggggtccttgatcctgctcggaattgaccgggctgacaactacctgatcttaattggagctatcccggccgccatcttgtctttggtctttgacggcctcctccactacttggagcagtctagtttcaaaaaagttgccacgactttagtggtaactgggggaatcatcctagcctttatcttcttacccagcctcatcttccctaatgaccagctagtagtttctggtaagttaggggctgagcctgaaattctaatgaacatgtacaaagaattaattgaacaggacaccgacctagatgtccaggttgaagaaaactttggcaagacccaattcgtcttcaatgccttggaaagccatgacatcgacatcgctaccgaatataccgggacagtcttgggtacctttttcgacgaaataccagagcccggaacacctgccgaccaagtctttgaccgggcccaagaccggcttaaagaagaatacggcatggacctcctaccttctttaggctttaacaatacctacaccctggcagttgacccagcttacgccgaagaacataacctagagaccatctctgacttaaaagccgtccaagatgacatcaaggtaggctttaccctagaatttgccgaccgggaagatggctacttgggaatccaagacacctacggcattgaatttgataacctgactaccatggacccacagctccgctatacagccatggagcaaggggaggtaaacctcgtggatgcctattcgaccgacagcgaaattgaatcctatgacctagtcgtcttagaagatgaccaaaacctatttccaccctaccatgcggcccctattttacgggacggactcttggatgaccaccctgaaattgctgaaatcatcagccaattggaaggtctcattgatgatgaggccatgcgggaaatgaactaccaggtagaagtcaaccaggccgatgccaaccaagttgctagagacttcttagaccaagcaggcttgctaaaatagaaataaagctaaaagccctagccttgtattttaaatacagggcagggcttttttaggctcttattaattggaaatatcatctcaacttcaaattgatattgatctggtcttttgagcctagtgtggcctaggtttatcctcttatttgccaagaaccaaacgtctggtgtagacagcttgacccgagtgcatgtcagcatcatcgacaattgatatcaaccgggttagccgggtcactgggggtgtgtaggaccggtcaatgacttcatccaaactagctgggtcgatttttcccaaatagtccttggccaggtcgatgctttcagataaatagtctgtcaaaaggcttttgtcttccacttttactttttcggcttcttgaggactgtgcttgtagtctggggtatcatctggcaagtctaggtcaaagcggtcggtccaacccttactggtccaaagaggagactcgccttttaagctggatatttgcaggtcaatcatgcgggctgtatgccaaactaaccaagttacagacttgataaggggttttggcatggtattggcttcttcaacagtcatctggttgagcgattcaagtaaccggtcttgggctcggtccaaaattaaactagcaatatcttgtctttccatttgctccatccctttcaacattcgctttaaatattcacttctattttatgtcttttgcagaaccggtttaaacttaaacaaaccggctaggaagaaagtcaaccttccctagcaggctaataaaaactgtagctagtcactttagggccttcactgctcacgctttaagtaaaaaaccactaagccccagagagcttagtggttttggctagtttagaaattaaagtttgttcaaggcatcttcaatctggtctgagccagagaccaagtcaaaagccttgcggacagttgagtcattgtctaagctagcagcaataacccgggccacgtcgattcttgggacagtattgtcttctgcatcagtgatttcatactcaagacgaaccgtatcgttggaatcttcatcacttaagaggcctggccggataatggtgtagtctaggtcggtcttgtcaaccagccattggtcagcaaagtgtttagcgacatagtaaggcttaatttggtcgctaaagcggtcacggttacctgcaccaaaggcagagacaatcaagaaacgtttaatgccactagccttggtagcttccatcactttaaccgcaccgtctaagtcaactaagagggtcttatctgccccagttgatccgccagaaccagcagagaaaacgacggcatcaatatcagttaaagttttcttaatctcatcaattgagtcttccaagttaccaagccgagcttctacacccttgtcttggaattgtttgatctggtcttcacttcgaacaaatgctataggattgtgctgtccttcttcttttaataggtctacgaggtgttggccaatttgaccatgggcaccgacaattaaaacattcatcaaacacacttcctttcttatttgttacatcttaaccataacaaacaagttacttttagtctaaggaaaggcttggaccaagcagtgaacggaaaatatgtgctataagtcggtctctttgataagactagcagttaaaatcatgccagcttgcttctcaaacttgcttcaggcctagcccctctttttcatagtgaggttgagtaggaagccccctaaaataccagcaataagccaggataaggtgtaaaacaaggggctagatacgccgccagcgacaaccgcaaagagaccaccgtgagggacttggctggctgacccaaagaacatagacaaggcaccagctagacctgaagagacagctaggggtgggatgacccttaggggattgctggccgcaaaaggaatagccccttcagtaataaagcttgcccccataacaatattgacataggcactttttctttgctggtcaggccataagtttttgttaatcagagctgataccgctatggctaggggtggcaccatcccgccgatcataacagccgccatgatatcagaaccagacccagctgaggtggttaagagggctgtcccagtaacataggcagccttgttaattggcccacccatgtcaatggccatcatggccgccaccacaaaaccaagtaggatggaatattctctcgggatgctattgataaaattgatcaaaccatccatcacccaagccatgggactattgatgacaaagaacatgaggccacccatcaataagacacctaaaatcgggaagataaagatgggttttaaaccatccaaggacttgggtagccaagagaaggcccagcggaggaagtagatgatccctccagctagaaagccggctaccaaagcccctaggaagccagacccctggaagttttcaaagtatccttcctgaccaaaggcggatagaatttctgggtcggcaaatatcccacccataaagccaaccaccagtcccggtcggtcggccatggattggccgataaagccagctaacatgggcagcatcatggcaaaggccatgttgcctaaactgttgataaagtgggcattggcattgaagtctgggctggctgaatcagctgcattaatgccccaaaagaaggaaatagcgatcaggagaccacctgctacaatgaaggggagcatgtgggagaccccgttcatcaagtgcttgtaaaaacgtcggccaagtgattcgtctcccccttggtcttcatctgacctttcatttttgccagcgtggtaaattttggcatcctggttaatggccttgtcaagaagttcatccggcttgttaatcccatctgccaccttgcggatcaagacaggcttgccatcaaaccgggccatgtccacctgcttgtcagcggctacgataatagcccttgcgtcttctatatcttgcttggtcaagcggttgttaaccccattttggccattggtttcgactttgatattaatatttctttttttagcggtttctttgagcttttcttcagccataaaggtgtgggcgatcccagttgggcaggctgtcaccgctaagatatagggctctttttggctgctaggatcaatctctggctgcttttcattaggatcttggtctttgagaccggcttggcccgtgtcatctgactccgtttcttggctgtcttttggatcttcttcgtaagccttaaagactgacaagacttggtcaggactagtcgcttgtaagagctgggctttgaccccttccttcatcaagacacctgacagtttggctaaggcagacaagtgggcattgttgccgtctttgggagcagcgatgaggaagattaacttggcaggctggccgtccaacgcctcccagtcaagtccagactgaactcgggcaaagacaatgactgggacagccaagtcttcatcttgggcatgggggatggcaatttcatctcccactccagtggttgactgactttcccggttcattaaggcttctaagaacttatctggctgagatattttcccttcctggtgtaaaagcttgaccaaattctccaaggcttcttgcttagagtctgcttgtaagttgaggtccatgaaggccggtgaaaataattcagataattgcatagtctatactcctttttctctcggtcattcttgaatgctaacttggtcaacgagggattggaccaagtcttggctggcaatccccgaactaaaggccgaagctgccccacatgcggtggcaaaggctaaagcttgacggtaatctcccttatcccaaagggaggcaataaagcccgctagcatggagtcacccgccccactaggattgaccacctgtccttttggcgcctgggccctgagaacctggccatcccctttgagaaggagggccccatcaccccccatagataagaggatgtgtttagcccccgcttcttggagttttttggcataggggagggcctctgaccctgttttaagctggacaccaaagatgtcccctaactcatggatgttgggtttgatcaaaaagggctggtaggccaggctagcagtcaagaggtcagtattggtgtcaaccactaattggcttcccgcttttttcaccaagtctgccatagtctggtagtggtccttggtcatacccggggctatattgcctgatagaaaaaccaggtcagctggtcttaagtggtctttaaaatagcgggtcaattggtcaaaataatctgggctgacttgaggacccggcccattgatttcagtctctcggccgtcattcagtttaatattgacccggctgggctggcccaggtctataaagtggctggctatgccccagtcttttagactgctttcgatataatcgcccgtaaagcccccaataaaacccgtcgcaaccgattctacccccaagttctttaaaagaaccgaaatatttatccctttacctccagggataaaggtctcttggttaatccggttgagctggcccaacttgatctcatcggcttggataaaaaggtcaactgccgggttaaaagttaccgtgtaaaacatttcctaaacctccttcagtgtggtcaagtctatatagtctttgcgtaatggatcagtcaaagtggaagtgataaccatacagtcagccaagtctaaaaatttgtgaaagctgaccttgtcaaacttagacgggtcagccaggacaaaaacccggtccccattttcagctgctgcctgcttcatagcggcttcttcagagtccggtgtggtaagccccaacttagcatcgatactgttggttcctaagaaaacatgggaaaaacggtagttgcggacttggtcaactgcctgggtccctaccacagcctgggtgttcaacttggcctggccaccaactaggatggtctcaatccctagggtcaagagacggtggccatggttgactccattagttaccactaggatgtccttgccctttaagtagcccaccattgccaagctggttgtcccggcatccaaatagatccgggccccgtcttggacaagactagcggcataacgtgcaatcttagccttttcttgactgtttttgactgctttttcactcaagtccaattccggggtcaagtcccggggcaatttggcaccgccatggacccggataagcttgccatctgcttctaggctggccaggtcccgccgcaccgttgattctgaaatgcctagccggtcaaccaagtcctggctttggatgattttatcttgctgtagttgggttaaaataagctgtcgccgttttgccgtaagcacttccatcacctcaagtctataatacactcatcaacattcaaattcaatcactttcagtcatttttttaaaaacacacctccgctccattgtctgccacaattcccagaccaggcaatacaaaaagaccagcttaaccttgtcggttaaactggtcttctttctttaaattgctcttagcttatttggtatcttggaaatcgaccgcgacaacttccacatcaatttcgccgttttgaacagctttggaataagggcaaacagtgtgggccttatcggctaattcttggaccttgtctttgtccacaccatcaatcccaacttcgatccggacggccaatcgaaagtcagcttggccaggtttggcataaaggtcaacttggttacggacaacagacttgccatcgacattttcttggcctttaactgcttctaaagcaccgttaaagcaagcagaataacctagggcaaaaagttgttccgggttagtagttcctggtttgtccttacctggagcagaaacttgaacttcaaagtcgccaccttcgatgtagcttcgaccatctcgaccgttttcgttaacgcctctagtagaataaactttttcgtagtctgacattgatctctctcctttgttcgaattctcgactggtttcattttaggtcttttgacaaagggattcaatctttatgcctgtagactaaccgagctggcttcttcctctttttcaacttcatcgtcatcggcatccttaggtgttttgagaaggcggaggccgtttaggatgaccaagatagtagatccttcgtgggccacaacccctgtcggcaagtctaaaatacccaggagatttaagatgaccaggatgacaatgaccccgacagcaaagacgatattttggataatgatcttgttcagccgcttactgaggtcaaaggagtagaagagcttggctaggttgttttttaccacgatcaggtctgaagactccatggcaaccgaagacccagaccccatggcgatcccaatatcagcattggctagggcaggggcatcattaatatcgtctccgatcataccgatgactgtttcctcgttttgggcttccttgacaaagacggtcttgtcttctggtgttaggctggcttcgtaatggtctagaccaatagcttgggctacctggctggcagctgtttcattgtccccggtcaagagagagacatccacccctgccgccatgaaattgcggacagcttctttggcctcttgtctgatttcatctgctaggacaaagtaacccttaatttcatccttgtaggctgctaccacagtcgtttgcttgttttctaattcttgattcaattcttggtagcccttgtaactttcaaagaccgacagcttccctaagagccagtctcccatttttagccccacaccggctacttcttccaccggttgactgctatcgacctggctgaattcaaggtccttaaagtggtcaaccaaagctctagcaatggggtggttggattggttttccatataagtaacataggcaagggtttggtcgctggcttggtagtccaccaaggtaaattcaccaaaggttagagttccggtcttgtcggtaaaaagttggtccatggaagacaaggactccatagctgccccacccttgactaagatcccgtgcttggcgccattactaatggcacttaaggtagcaggggtcgctgaagcaaccaaggcacaaggactggcaactgtgagtaggaccaagccccggtagatggattcttgccagttattagcagttaggccataaagagctaagacaaagagggggacagcaattaaaacagtaataacatatttcgtttcgaagcggtcgataaatttagcaatattggacgggtggtcttgagcttcttccaccatttttacgatagaggagaagatggtctcatcactagttttggaaacggtcaacttaaaggcattgccttggttgatggtcccggcaaaaacttcctggcccgcttccttgctaactgggatagactccccagtcaaggctgattcatcaatgctaacctgactgtcaacatagccgtcgatcggaacctgctctccctttgcgaccaggacctggtcttctaattgcaggtcttcagttgccacttccttggtctgtccggacgccataactagtttggctgtttctggcacattggacatcaaggctgaaatttcattggtggtcttgtcagtggcatactcctccaacaagtcggacccggagaaaataattaaaaggacggccccttctgattcaaagttaatggcagctgcccctaatgcggacaaaatcatgagcaagtcgacattaggactcttttctcttatcgtgtcaacaacggcatccttggcggcaaaaaagccaccaaagaaaatagcaatataaaaacaaacccgactggctaggtcatgaatgggcatcaggacaaatccggcaacggtaaataggatagccaaagaaaaaaactggccctttcgtgacttgaataaaaattttagcatgctgtcccctccctggtggtctttgtttataatcattattgttaataagcttatcgagatctttatttataaatacattataccaattataaataataaccacaagtgagattaagggtttctttgaaaacaatctaaaccgtaaccattctcaataaaaaggctgtattcttcttagaagatttccggtatactataaaaaaggaggttcaggctatggaagaagaaaaagactttatcatgcgacaaatccaccaggtcatcgataatcttggtcggtacttgaccaaagactccctcaaagcctatatcgactacgacctggccagtcaatctgccctgacggaaagggaaattgaccaaattcttttgattcaggacttaaaggaagtggttagtcgctaccagattagccaagacacactcagccgggaccttagtttagacctagaccaaattgagacctactaccacctggaagaagacctccctgacccggtccatgccaagatccaagcttttgtgaaagaccattcagactaacaagcaagcagacattgcttgggaaatctcaaagcaaacaatgaatttaaaatgcataggaaaaccaccccatcaaaaagggtggtttttctttgaatagatatgcttttcattcggctttctatactgacaagtacctagcttaacaaagtcatgactagaaagttatttacacccggccaagcacaagctaacatggtagctctttataacgctgaccagtgactagcattcatctttttctaagtcatttaaaagggcaagcaaacggtcaggatagtccgtcatgataccgtcaactcctaagtcaattaaccgcttcatttctcgctcatcattcactgtccagtaataaaggtggagtcctcttttataggccattttccgaagggactcgcgggttaggtcaaaaccgtaacgacctaaggggagttggaaggaagaagctgaactcttagtcagaccggttagaccaaattgggacttgaccacaaaagaggcaacagcggaaatccctgctcctaaagcaacctggccgccactgatgcgggcaaagtcatctaacaaggcctggtcgaaacttcccactgtaacttggtcctgcatttgataagcttgtatcagtcgccacaattcctcaagcccttgctggtggatgtctttccggttgctagccttaaattcaatgacaaataactggtctggatagcgggcaaaaacttgatctaagcttagaagagagaccccttggccccggtagggaaattgaccggcttcatcttgaaaatggtagccagcatccaagtctttgacttgagccagggtcatatcattcacccggcctgacccattagtgacccggtccactacggggtcatgaatcacaagcaactggccatctttagtcaagtgaacatccagttcaaaaaaattgacacccaagtcaattgagtggtcaaaggcttcctgactcccttcaggtgccagacccgccccagcacggtgggcaatcaccaagggaagttggccttttttcatgccttccgccttcttggtaaaggctgatttttgcttttgaacaggccattggttgatggccaaataaatgccggctattccgatcaaactagccaaggtcatatagcttttctttttcatttatggtctccttctctcaggctttaaagctggttcattaagtaaggtaagtcactttcaaattgaatcccataccgacgcttatcctctgacagatggctggtccgaccaatacagcggctaacatagcccaccgcaatcgtcatagcctggtggattgatttgccttgtaggatcaaaccagtcaccacactagcaaaaaggtccccgctcccttcatagtgtcctgggtagtagggggcaaattcccgctgtacttgctgggtttggccattgcaggaataggccccaatctcttggctatcctttgaatgaactcctgttaaaatagcggtctcctggctgatcttggcaacctggatgaccaagtcttcgaggtcaaccgaatcttgacccaagtcctgactgcccaccaataaacccgcttcagtctggttgggcaagaggacagaggcccgcttggccaacagtcgcatctcatttacataatcctggccaaagccatcataaaggtctccggattcagccatagccgggtcaagaatgaagtgaccacccttttttaaaaaacgatcaacaatggcctcaatccgcttgatctgcttaactgaaccgatatagcccactaaaataccgtcaaaacgaattcccagcttatcccagtgagctaggattttttcgttttcctcggttaagtctaagtaagtatactggtcaaagccggccgtggtatgggtactgagcagggcagtgggcaagatgttaacctcatgatccaggcaggatagaaccggcagggccacattcatggaaatccggcaactagccgatatatcttggataatcaaaagccgagcttgtgtcacattgactgcctcctcttcgcttgctttacttcaaatcttaccaataataaaagcctcttgcactgataagtcctttttagcaaaagaaaaactctagctgggatccttcaacccagctagaggccaaaaatctcaacccggcttatggtccaagtgggatgccaaaaccgagccagacgatgagcaggatagaccagaaggctaggaaggccatagagtaagagaacatggttgaaatgatcgttcctaggccactttcttcatcatagcgctgggccattatgaggatgatgggcataaaactcatcaagggggcaatgatattggttgaggagtcggcaatccggtaagccattagggtaacttcaggcggaatattcaaactcataaacataggggcaaaaattggagccaagataacccacttagtcactgccccaccaataaagaggttgatgatggaagttaagaggataaaaccaataattaaaggaatcccgcttaggttgatgtcccttaaaaagttggcacccccgaccgcaatcaaggtcccaagattggtgtattcaaaataattaactagctgggctgcaaagaagactaggacaatcatacctgcaatcgaagaaatggcctcggtcatcccagctacaaagtcagctgagtccttgatcttgcccaccacaagtccgtaacacaaaccaggtagggcaaagaggaagaagatagccagcagtaagccattttcaagaaagtcatttaaatcaacttggccagtcacttcattgtaggtctggaagggggctcctggtggaaacatcaacaaagccatcacaagggcataaacaagaaaaactgccaaggcccacttaagccccttccgctcctggtccgttaagggttcattgtccggcatataggacccggtgtactctcccagccttggttccacaattttttcggtcacaatcgcccccacaatggtcagtaagattgtcgagacaatgaggaagtaccagttagcagtcaccgttacttcatagccgatattggctgaagccaaggcatcattgatgatcccaacaaccagggcatcaattggcccaaccagtaagttggccgaaaagccaccggatactccggcaaaggctgctgcaagtcctgcaatcgggtggcgtcctgctccagcaaaaatggtggcacctaagggaatgatgacgacatagcccacgtcagaagcgatactggacataacaccggcaaagacgacagccatggacaagaaggcagatggtaagttgtccaggagtctttttaaactagcccctatcaaaccggtccattccgcaatccctactcctaacatggctaaaatgacaacccctaaggctgaaaagcccataaagttatcaacagcctggttaaaaatataccgcaagccttcaaagtcaaacatggttttggcctcaaccaatatttcttcattgcttgaagcatcaaaataacttaaagaagcccccatcatataagctaggtgggcagcaaccatgacgatcccaatcaaaataataaagaggacaaccgggtggggcaaggcattacccccacgttcgatgtagcctaaaagacccgtgttaccgctttcttttttcttgtctcccatacaagatcctccttttttcttggttacagctattctagcatgactagcaaggagaagcagtatttatgagagcgctcacataaatttactttttaaatgaccatttgacctaagccttccctgatagttgagattagagtcagcttctcgcaagaaaactccttataaaataactgttatttaatgacaagatatttattttttgccccattatcggtatactcaggaatggagtttttaaaatttgacttaaagaatcaatgaggagaggtaagcaatggaaagagcagtcggcacggtcgtacgcgggctcaggggccctattgtccataaaggagacgacatggtagagacggtcgttcagaccatcttacaagctgcagatgctgaaaaatttgagattaaagaccgggatattgttaccattacagaatctgtggtcgcacgcgcccagggcaactatgccagcttggaccagatcgcacaagatatcaaagataagttccaagaccatactcttggcctagtcttccctattttaagtcggaaccggtttgccaacttgcttaaagggattgccagaggggctcagaaaatcgtcctcctcttctcctaccctgctgatgaagtgggtaaccaccttatctctttggaccaattagacaaaaaaagtgttaatccttggtcgcaagtccttgatgaaggagaattccgggagctctttggctaccagaaacacccctttaccggcattgactacatcgactactacaaatctattgtccaagaagagggggctgaccttgacattatcttctccaacgatccccggaccatcttagactacaccaaacacgttttgacctgcgatatccacaaccgtaagcgaacccaggcccaaattaaagctggaggggcaaacttggtctacggcctcgaagacgtcttatctaaacctgtaaagggcagtggccacaatactctttatggcttgctagggtcaaatcggtcgaccgaagaatctgttaaactattccccgagggcggccaggaagtggtggaagccatccaagcccaaatcaaagaaaaaacaggcaaaaccatcgaagtcatgattaatggcgacggggctttcaaagacccagttggccaaatttgggagttagctgaccccatcgtctccccagcctacacccagggccttgaaggaaccccaagtgaaatcaagctcaagtatttggctgataataacttcgcccaccttgaaggggaagagctcaaggctgccgtttcagactatattaaaaacaaagatgaggacttggttggttccctagaatcacagggaaccaccccaagaagattgactgacttaatcggttccttggccgacctcacttccggtagtggcgacaagggaacccccttcgtttacatccaaggctactttgacaattttactgattaacttagcccatctatagccccagaaaataatatgctcccccaagataggcacttaaaaagttaaaggacttttggtggagcttttttgacactttagttttgaccttgctcatttaataaaaaacgatattctcaaacttaccccatgtttgagatttttttctggaactctcaaacaacaaatgttatttgagggtccagtgtttttcctcaaacaactttagttactcaatcaagtccagatctctgtgtaatttctactatatagtaatttatgttataagatgggctttttttccagagttaggcaggtttaaaagggtcaagcttttcgtaaaaatggataattcttggcttctcaattctcatgcaggttcagtaagaccgagacggctagcccattgtcgcttttcagattcgaaagtaccgaacggctagcccattgtcgcttttcagatttgaaagtaccgaatggctagtccattgtcgcctttcaagtttgaaagtaccgaatgactagcccattgtcgcctttcaagtttgaaagtaccgaatggctagcccattgtcgcctttcaagtttgaaagtaccgaatggctagcccattgtcgcctttctggtttgaaagtaccttatttttatttattgtccagtttcaacttcaaaacttccctatttcgatttattgtccagtttcaaatctaaaacttccttattttgatttattgtccagtttcaactttgaaattgccttatggctagccgattgtctcctttcagacctgacaggacttaactgggaattctataatcgctaagcaattgtagaactttaacccggaaattctataatcgccaagcaattgtagaatatttacccggagattctataatcgccgagcaattgtagatctttgactcagaaattctataatcacaaaccaattgcagttaagtcctacgctcggtatccaacctacaattaatcgcaccaatagaggatagtgccacctttccccttatcagctagattactttttaaggaacaccgattcatagccttaaacccaaaatacccgaacgtgaattctttatcattgacattgtaaccggttgtcggtatgcttttattaagttaatatttcttcggggcagggtgtgattcccgaccgacggtgacaagcgaatcttgaagtccgtgacccactattcaagtgtggttgatctagtgagaatctagaaccgacagttaaagtctggatgggagaagaaaatacgactaaattgatgatagtaaacagccattcaatttaagcctattttgataaatcttttgccccgtgttttgagcacggggtttttcttgtttttgatagctactttaccctgccccattaaccatcctttttcactaactttgaagaaaggaagtggtgtgaggccagagtaaagtagttttttaggaggaatgagaatggatcaatattttatggaaaaagccatccagctagctcgagctgggcaagggcaaacccttaccaaccccctagtgggtgctgtgattgtctaccagggcactatcgtagcaactggctgccacctgcaatatggtggtccccatgcggaggtcaatgccctgaagaattgccctgaagaaatcttggctaaggccacaatgtacgttaccctggaaccttgttcccaccagggcaagcagcccccctgcagccaggccattatacaaagtggcattaagcaagtcgtcatcggccagctagaccccaacccccttgtggctggccggggccaagccatgctccgggaaaatggggttgaagttgaaagtggggtccttgaagcagagtgcaagcagttaaaccccttctataatttttttcaccaaaacaagagaccctttatcactttaaaactagccagcagtttagatgggaaaattagcttacgggacataagaaccccaattaccggatcggaagtttaccaatatgtccgccgggaaagaaaaaaataccaggctatcttagtcggtagccaaaccgccattacagatgatccttcccttcacactattccaagggggccctaccccccgcttcggattgtccttgaccgccggggtaggttgaaaggctacgaccagcttcaactattccatgataaggaccaggaagtctggattttttcagaagccaatccccccacaagtctgcctgaccattgccggtgggttgtccaagaaaaagtaaccatagagagcctggtagactatttgagccaagaaggggtccagtccctctatgtggagggtggggccaggatccatgacgcctttatcaatgaaggcttgtgggatgcatttatcagctacctagctccaaaaattattgcaggcaatggcttgcctgccacatcaagtgaccgagtaagccaggaacttttagacttgaaggatgtcaaagttcagcaaatcggccaggatattcgcatatctgggaggagataaaatgtttaccggattagttcaggaaaaaggcaagattttagacatcgaaaagagtggccagaccatccgcttaacctgccaggcctcgccaagctcacttgaggactacaaagaaggcgacagtatggcagtaaacggcacctgtctaaccgctacagagattgaccaagcgaaattttcagttgatattatgcctgagacctttaaccggacaaattttgcagacttagagccgggtgacccagtcaatttagagagacccttaggagtgaaggaccggattgaaggccacattgtggcgggccacatcgatactaccgtccggctcctacaaaaggaagaaagagaaaatgccttggttttgacctttcaatatccccaagaccatagaggagaaattatcagccaaggttccattgccatcaatggggtcagtctaacggtcagccaagtcaccgatcagaccttttcagttagcctgatcccccacactttagacttgaccaatcttggaagagtggaaattggtaacaaggtgaatattgaaacagacatgctggctaaatacttaaaagctcagagattgccagtctaaaatagaaagaaggtcatatcattgacagacacagttcaagaggctgttcaggccttacaagatggtaagctcattatagtcgctgacgacgacaaccgggaagcagaaggcgatttagtcggactagctagccaagcgagtcctgaaacccttaacttcatggtcacccatgcaagaggcttggtttgtgctcccctatcccccaaaatcgctaaacaattagacttaggtcccatgacccaggacagtagcgatccttatggcaccggctttaccgttagtgttgaccaccaaaacactactaccggtatttcagcctttgaccgggccgaaaccattcggcaactggcttcccctaagtctcaggctttggatttccgccggcccggccacatctttcccttgattgccaaggaagggggcgttttagagcggcgggggcacaccgaagctgctgtcgacctagccaaattagctggagaccgtcaagcagcttatatctgtgagattttaaaagaagatggcagcatggcccggttgccagacttggaacaattagccaagcagtggcaaatccctctcatcaccatcgaggacttgtctatcgccttagcttttgacagtgacctccatgtttccctacccaccaagtacggcgattttgaccttacccttttccaagaccaaaagcaaaaagaccacctcctcctgtccaagggggatatccgccaaagccctgaccccctcttagtccggatccattctgaatgcttgaccggtgatgtctttggatctgagcggtgcgactgcggtcagcagttagaagcagccatgcagaagatccaagaagctggccggggagccatcatctacctcaggcaggaaggtcgggggatcggtttaaaaaataaaatcaaggcctacaagctccaagaaaaaggaatggacacctatgatgccaatgtccacttgggctttaaaccggatgagagagactaccgttttgcctataaaatcctccaaaccttggggatccagtcagtccagcttttaaccaataaccctgaaaaaattgaccagctaaaggacctgggacttgaagtcaccaaacggattcctttagaagtccaagccaccgggagcagtcaggcttacctcaaaaccaaaaaagaaaaattccaccacctattatcattgtaaaggagtatgatcatgacaacatatagaggaaatttcaccctaaagcctaagacaaaaattgccctggtagcaggtcaattcaatgactttatcaccgaacgtttggttgagggggctaagggcaccctcgtccagcacgggattgacccagacctaatcgacacctactgggtacctggttcatttgaaatcccctacctgagccagcagttattaaaacacaaagattatgacggcatcctcaccctgggggccgttatcagaggggccaccagccattatgacctcgtcagcaatggggtggctaaaggggttgctaacctgtctttacaagccgatattcccatcttatttggtgttttaaccaccgacagcattgaccaagccattgagagggctgggaccaaggctggtaacaaggggagcgaagtcgcccaagccttactggaaatgatctctttaactgaccaaatccagccttaaattactggaaacaggaaaactggtcacctgcctccgcctcaaactcgtcttgcttgaccctgtctgacagccttaacactatagggcttcgcgaatccctgctagcaaaatggtggtgtagcctaagccgagttaagctcaaaataatcgagtaggagactagccattaattggctagtcgacctctcacaccaccgtgcgtacggttccgtacacggcggttcaatatcttgcgtaagcagactcagcgatagtgcttagtggaactaagccccacttgctgagtctttctgttgttattgcacgatgaaattcatgtgtgcatgacagtcgccagtactttttgcgtgaatacgcaatccgtttggctgaatctaagtccagtccatattgttccaactttggtataatagttcgtggacgtttccaccgtttaagaatcagctgtctgatacggtgatttaaccattgctcaacttctttgataaagcttttaatgaagcctaaaccaaagtaattaatccaaccgcgggtgactcgattaatttcagtcattatctttttaaaagtacctggccgtttacgactggtcagctttctcaatctgcgtttgaatttctgcttggcttctttggtagggataaaacgataatccccattcacttgcttcatcagacagctcaaaaactttaaacgggtaggagacccaacctggcttttgtcttgattgacgattaactttaagtctttttcaataaagcgtgtgatgctgttcattacccgttcaccggctcgttttgatttaacgtagatgacaaagtcatctgcgtatcggacaaatcggtgaccacggttaaccaactctttatccagttcatgtaagtacacattactcaaaagcggtgatagaacaccaccttgtggtgcccctgtttcacttgcgataaattcgctagtcaaatcaattacacccgctctcaaaaacttacggataattttcagtatcattttatcttggatgtactgttcaagataatagataagtttgtcgtgattgagcgtgtcaaagcattgtttgaggtcacaatcaactacaactcgatagccttctttataatactgtgcacattgcttgagagcactgtgcgtgcttttccctggtcggaatccgtgactgttgtcatagaagtgcgggtctataatcggttcaattacttgccgtatggcttgttgaacaactctatcccgcacacaaggtatacctaactttcgtttttctccattcggctttggtatttctactcgtttaactggttgaggcttatacgttccatcaagtaatttcttccgtaagggttgataatacgcttgaatgtgctcctctatctcaaaaacggtcataccgtcaatacctgcagcgcctttgttccgtttaacggctttggctgctgtttccaagtttcttctgtcaacaacttgctccattaagtttggagacttacgatacatttctgtcatttcacctaaagtttactagacgcatcggcttaccctttcggttccacctattctctccaccgattgccaatctcttcgattgttttctgtcctattcgtaaactttaacctccgttctatactttgtatgaatattgttcagtccttcgctacaacgtagctactatgacctcggctgacttctcactattcgttgttactactaaacgctagtgagacctccccgagtaaggtgtgacaaccttccactcatgtcactgcttcatttactgaaagggacttgtgcagtattggactttactttgttatgcaagctcatccatctcaaatcagccttgatatgaagtttctgttcgtcagtgcgagtgtttgcctccagcttccttcagattccacctcacgatggacacccttgccttcagctaacagttcctactgccaggcctgcagtggactttcaccaccaagttgtcacccatgccgggcgcacatataaacaaaaaacaccagccggttgctggtgtttttctttcccaagagagtaagatagcttaacgttttgagaattgtgggcttttacgtgcttttttgagcccaggttttttacgttctttcatacgtgaatcacgggtcaagagtcctgcttctttcagcgggccacggaagtcagggtcaacgctagtcaaggcacgggcaataccgtgacgaatagcacctgcttggccagtaaagcccccacctttaacgtttacggacacgtcgtagctgccgactgtgtcagttgcttcaaagggttgtctaacgatgatgtggtggtggtcatagtttaggtaatcgctcatatctctaccgttaatgacaatagaacctgatccaggtgtcaaaataacccgggcagtagagtttttacggcgaccagttccgaaatattgtactttagccaaagtaattccctccttaaatcaagtttgtgatgtctaattcttctggttgttgagcggcatgtttgtggtcttggccagcataaatatgaagttttttcagttgctgacggccaagtcggttggctggtagcatgcctttaatggatagttctaacaaacgttcaggtttgtcacgaagcaattcgccagctgaaatttgttttaggccacctgggtagccagagtgacgtgagtagatcttgtcgctggcttttttaccagttaatttaacttttgatgcattaacgataataacattgtcaccggtgtccacatgtggggtgtagcttggcttgtgtttgccacgtaaaattttagcaactgctgctgaaagacgaccaagagagacgtcagtagcatcaaggacgtaccatttccgttcaatatcgcttgcattagccatataggttgtacgcatgttcttcctccaatatctctagattcattcattgccagggctaccgttccttatagcctggcttcaattcgattcatttgtttacaatcggtcacacaataagtttccggggcttatcatggggtaaacaataccaaggcaacatcataccgaaatatccgcttattgtcaatctttaccaggacattttcccatttttttgtccccactgacggggactgacccgtagtaaagttccatcaagcataagcccttgctgggcatggtcttgcctgcctgggaccggtctttagcttggataatatctgggacctggtctggatcgatcttgccttcacctgcagcgaccacagtccccaccatgatccgaaccatattatacaagaagccatccccgacaaagttaaaaatccagtcatggtcccgcacttccaagtcagcccggtagagggtgcgaaccttgtcttttacgtcagtttggctagccgcaaagctggtaaagtcatggcgtccgaccaagtgggtcagggcagcttgagcagcttctaggtcaagcgggtagggatggtggcaggcatagaggcggttaaaggggtccatgatagggttattagacagccagtagcggtagtgcttccctttggcatcaaagcgggagtggaagtcctctcctacccggtcgagagactggatggcaatgtcaccaggcaagagggtgtttaagccacgctggagtcccttgctttcgatttcaaaaggaaagtcaaagtgggccacctgacccctagcatggaccccagcatccgttcgggaggcagcatggatgcggacaaattctcctttggccagtttttggagggccccttcaatttcatcttggacggtcaaagcattgacctgagtttggtagcctgaataccgtgtgccatcataggctatcaccattttatagcgtaaagacatggacttcctccttacttcggattcaaccaacttttaaagccgttaaaataccagccaaaagcacaaactcttagctggtagaaattttcaagatttgctcttatgttcgcagtaggaaaagtaaaatggccaaagccaacatgaccaagaggaggaagctgtctcgtctgtaccattccaactgccggaacttggtccgaccttccccaccccggtaaccacgggcttccatggcagtagccaggtcatctgcccggttaaatgacgaaacaaagaggggaatcagcatggggacaatggctttcatttgctcatacaaattgccttccccaaactctatcccccgggcacgctgggcattcataattttctcggtttcatccatcaaagttgggacaaagcggagggcaatggataacatcaaggcaatttcatggaccggcaccttcacatacttgaagggtcgaagaataaattcaatcgcatcagtcaaactgagtggcatagtggtcaaagtcaaaagggtagacataaagataatcaagacaaagcgcagggcaatgaacaccccgttaaccaagccttcctcagaaaccacaataggaccaaagctaaacagaatggtgttacccgacgtgaagaggacttggaggacgacagtaaacaaaatcagccatatcaagggtttaacaccattaagaaagaaggaaaacttgataccagacagcttcagtcccaaaaaaacaaaggccgccaaaagcaggtaggtctgccaattattggcaaagaaaataataatgataaaggccatggcggacagaagcttacttctgggatcgagtcggtggatgatggagtcgcctggaatatagcgcccaaagattaacttatccatcatatgaaccactctcctctcgcagtttactagcaattgcttgacccaattcttctgtggtcaaggggaggaagtcaaagtcccatccaaactctttttggagcctattggcaaatcgaacagactttggaagcccaagtttcaggctattcaaccagtccgcttccttaaaaatctcccggggctgaccttcacgcttgaccgttccatgatctagaacaatcatatggtccgcatagtctgccacatcctccatctggtgggttaccaggacaatggtcaagccctcttccttatggagtttgtaaaacatgtccatgatttcttgccggcccttggggtctaaaccagctgtaggttcgtccaggaccaagacttccggttgcaaggccaaaacaccagctatggcaacccgccgcatctggcccccggataggtcaaagggagaccggtctctaaaggactcatctaagccaaccaaaagaagcatgtcttggacaatgtcatcggcttcctcttggctcttgccaaagtttttaggtccaaaggcaatatcttggccgaccgtttcttcaaaaagctgggcttcaggaaactgaaaaacaatgcccacttttttgcgcaaggcttttaatttcttgttttcactttcttgggaaatgacccggtccccaatatggacttgaccttcagtgggaattttcagggcatttaagtgttgtaaaacagtggacttcccgctccccgtatggccaaccaaggcggtgtaagaaccgtctttaatggagaggttgatgtcataaagggcacgactttcaaagggggttcctttttggtatgtaaagcctacttcttggaaacggatgtccatagccattccaccatcccttcttctgataggtagtcttctggcacggggatgccctggttttttagggctaatttgacttgttcggaaaagggcaggtccaagcccaagtcaatcaagtcttgtccgaggtcaaaaatctcttggggcgggccaatccggtcgatcttgccgtctttcatgacaatgatttggtcgctttccgttgcttcatcaatatcatgggtgatggaaataacggttaagttttcctggtccttgacttctttgaccgtccgcaaaacatctaaccggccagatgggtccagcatactggttgcctcatctaaaatcataatctcaggctggagggctataattccagcaatggcgaccctctgcttttgcccccctgacaggcgggcaggctcccggtcagcatattccaacattccaacccggtctaaggcagcccggatccgaaccaccatatcttctcgtggcacacccaagttttccaaaccaaaggcgacatcatcttggacggttgagccaacaaattggttgtctgggttttggaagaccattcccaccatctgacggatggaccacacattgtcttcattgagttcataatctccaacctggactcggccagagtttggggcaatgaggccattgatggtcttagccagggtcgacttgcctgaaccattagacccaataaccgaaacccaatcccccttgtcaatggtaaaagagacctcattcaaggccttgtggtcatcttcactattatatttaaagctaatattatctacgcttattatttcagccatccaaccgctccatatttacatatcattaacatttcaccttaacgctattagactaacaaaaacaaaagctttttacaatttaaattagttataagtcaaagtgccagacaaaaatccgaacactactgtgaaaagggctcgaaacttggtctaggcatgaaatggatttgataagtatgatcactttgcttgctagtagagaatccccctgctacaaatctttatgtataaaaaaagaactttgatatatgggttttcctggaagcaagttgcctccaggaaaacgagagctagacacttgggactaatgagccccatcatcgtaacgctccatacatctaaagttagttgaaagtttattcttcttctgctacaacttcttcaacatcgtcatcttcgtcaatagaatcagtgtcgcctttgacaacgaattccaagacggccattggcgcattgtcaccgcgacgaggttcagtgttcaagacacgagtgtagccaccattacggtcttcaaaacggggagcaatgtcgtcaaataacttttgtagcgttgattgaacaataatttcttcttctgtttcaccaacagttgccaattcattgcgcaagaaagctgcagcttggcgacgagcatgcaagtcaccacgtttgcctaaggtcaccattttgtctgctaaacgttgggcttctttggcacgagtttttgtggtaatgatgcgttcattaataactaagtctgatactaaatcgcgaagcatggcttttcgttgtgaactagtacgtccgagtttacgatatcccattttactattcctcctttacctactattcttctttcaagcttaggtctaagtcatcaagcttgtttttaacttcttctaatgacttacgtccgagattgcgaactttcatcatttccggttcagttttgtccgttagttcttggacagtattgatgccagcacgtttcaaacagttgtaagaccgaacagataaatcaagctcttcgatggtcatctcaagcattttttctttctggtcttcttctttttcaaccataatgtccgcttcacgtgcttgctcagttaagttgatgaagatgttcaagtgttcattcatgatcttagccgctagactcaagccatcctctggggagatggatccatctgtccaaatatccagggttaacttatcatattgctcgcgttcaccaacgcgggtgtcttcaacagtatagttgacacggctaattggggtataaattgaatcaattggcaaaacaccgattggcatatcatcatgcttgttgtgctctgcattcacataacctctaccagtttctgcttccatccggatgtgtaaatgaccaccttcagaaacagtacacaagtataggtctggattcataatctcaacatcactatcagtaataatatcagctgctgtcacttcagcagggccttcaatatccaattcaattgtttttgtttcttcagtatgaagttttaaagccagttttttcaggtttaagatgatggaagtcacatcttcaaccacaccatcaatagctgtaaactcatgcaaaacaccatcaatttgaatattggtgaccgcagcacccggtagtgatgataataagatgcggcgtaaggaattccctaaggtagtcccataaccacgttccaatggttcaacaacaaacttaccgaatttgccatcttcactgatctctactgtttcaattactggcttttcaatttcgatcatctacccatttacccctttcaaaacgttagtacatgtaatgaacattatcatctactaggcaattcattaaacgcgacgacgttttggaggacggcatccgttgtgtgggactggtgtcacgtctctgatagctgtaatatctaaaccagtagcttgaagtgaacgaattgcagattcacggcctgaaccaggacctttaactgatacttcaacagatttcataccattttccatgctacctttagctgcagcttcagccaccatttgagcagcgaaaggagttgatttacgagaccctttaaagcctagttgtccagcagatgaccaagaaatggcattcccttgaacatctgtaatcataacgattgtattgttaaaagtagaacgaatgtgggctacaccatgttcaatattctttttggcacgacgtttacgtgaaccttggcttcttcttttagcttttgccatacgatatacctcctaactttttaatttaattattttttcttaccagcaattgcaacagctgggcctttacgggtacgggcattgtttttggttctttgaccacgaacgggtaggttacgacggtggcggataccacggtaggaaccaatttcagtcaaacgtttgatattttgacttttttcacggcgcaagtcaccttcaacttttagcttgtcaacctcacgacggatggcatccaattggtcgttggtcaagtcacggacacggatttcttctggaacgccagcatccgctaaaactttttgagcagttgatttgccaataccgtaaatgtaagtcaatgaaataacaatgtgtttatcacggggaatatcaacaccgacaatacgtgccataatttacacctcctataaatttaaattagccttgacgttgtttgtgtttagggtttgagcaaataaccataacccgtccatttcgacgaataattttgcatttgtcgcacatttttttaactgatggtcttactttcattggattaacctccttcgttttcgcttcaagacacccacttgccaagcaggataagcccgcctaatcttaggcaaggggtattagcctagttagctcggggtcaattatttataacggtaggttatgcggcctttagaaagatcatagggggacatttcgacagttaccttgtccccaggtaagatacgaatgtagttcattctgattttacctgaaacatgagcaagaatttcgtgaccattttcaagttctaccttaaacatagcgtttggcagggtctcaagaatagtcccttcaacttctatcatatcttcttttgacacgaaatttcctcctttgaggtttctgttccacttgcttttatcctagtttcgacactcttacaattgtatcacaaaaaacaagtactacaagttttgatccaagatttccttgacatcctcaaagacatcattcgggtctccttgaccgtcaacccttgccacaatacctcggtccttgtaaaagtcaacgaggtcattagtttggtcttcgttaacctggattctgcgtttaactgtctctggtttgtcgtcatcacgctggtaaaaatcagtagagccacaaacgtcacaaacgccctctttttcaggttgcttgttaaccttgtggtaggttgccccgcaattagagcatataaagcgtccggtcagtctttccaggaggatttctttatccacttggatatacaagactgtgtccaacgatctacctttgtcttccagcatgtcttccaaggctttagcctggttgattgtacgagggtaaccgtctagcaagaagccagtctgggcatcatcctcatctaaacgttctgccacaattccgttggtgacctggtcaggtaccaagtcgccagcatccatgtatttcttagcttccttgccaagttctgtttcatttttcatggctgcccggaacatgtccccggttgaaatgtggggcaggtcgtatttcttcgtgattcttgctgcttgtgttcccttgccggcacctggcaagcctaataagattaaattcataaagtcctccattaatgtgtcctgcaagaaataaggtcaagcttaagctaacaccttattcctcacttttttggtaggattgaataaatccttggtagttgttcttgctcaacaagccttcaagctggcgcatggtatctaaaccgacaccgacaacaatgagtaagcttgtaccgcctagggtaatggaagaaggcatgttccagaaattggaagcaataatcggtaggactgagataagtcccaagtaaagcgctcctaccgtacttaagcgaataagcatgtaggaaatgtagtcttctgttgcccgtcctggtctaacactaggaatataggcattttgtttttgcaagttttcagcaactttctccggattaatctggataaaggcataaaagtaagtgaaggctacaatcaaaatggtatagaagatagccccaactggttcttccaagctgaaaatactagtcgctacctggaaccaagtcgaatcctgactaccttgagcaaacaagtttaagaaaatttgcggtgtcatgataaaggaactggcgaaaataaccgggataacaccagctgagttaacttttaatggtaaagtcgcatctccagctgatgaagcgcgtttagaataccgcaccggaatattccgtttggcattttccatccaggtgacaaaaatgacaagggcaattaaagcaagcatgaccagggcaaagacgagtactgattggatgagttcgtccccggcgttgccgacctgtacccggtaaaagttgatcaagtcctgtgggatagtcgcaacaataccagcaaagatgatcaaggaggtcccattgccgaccccgtggacggatatcatttcacccagccacatgaccagcatggttccagcagtcaaaataatagcgatggtaatatacgttgcggcatttggatttctgacgagaccaaagtcggccaaggcattaaaaccaatcgagatccctaagccttgtaagaaacctaaagcgattgtcccataccgggtgacattgttcagcttacgacggccaacttcaccttgctctgaccattccttgaacttgggtataacatccatctgtagtaattggacaataatggatgcagtaatataaggcgaaacacctagagcaaaaacggaataactggataaggcacccccaccaaatgtgtcaaggagggtgaagagtccagtttctgataattcatttaatgctgaggcatcaacaccaggaaccgtaatgtgggtcccgattcgaaagacgaagagcaaggccaaggtgaaaaaaactcggccacgaacttccttctcggtgaatgccccttttaatattttgaacattcccttagatcacctcaactgatcctccggcgttttcaattgcttctttagctgcaactgagaatttgtgcgccttcacagttaatttgcggtctaattcacctttagctaaaactttaataccggatttttgattttttataattcctttgtctttcagaagttctggtgtaacttcagtgccttcatctaattcgtttaaagtttttaagttaataatcgcatactctttacggttaacattggtgaaacctcgtttaggcagggtttggaaaagtggagtttgaccaccttcaaagcctagacgaacatttccaccagatcttgatttttggccgtgttcacctcggccagctgtattaccttgtccactagatgagcctcgaccgacccgtttacgggctttccgagcttggggagcttttaattcgtgaagtttcataacctggcacctcctttattcaaatcttttgcttagttgacttccttaacttctactaaatgatcgacgtgtttgattgcaccacgaaccgcttcgttatcaggtctgatgacactagaattaaccttgccaagtcccaatgccttgataatcttgtgttggttttgtggacgaccaatcaaacttcgcttaagggttatttccaagtttgccaatgtgcccactccttatccttgtaagtcttcaactgagacgccacgcaatttagctacttcttcagcagtttttagttgcgaaatggcatccaaggtcgcacgaatcatgttaattgctgtgttagacccaattgatttactagttgcatccgccacaccagcaagttctaagacggcacggactggtcctccggctgaaacaccagaaccagcaacagcaggtttgagtaagatacgaccaccagcgtgctcaccaatcacttcgtgtggaatggttgtaccaacgcgagggaggtagataaggttttgtttcccatcttcaacagcctttcggatagcttctggcacttcaagagctttaccagttcctaagccgacatggccatccccatcgccaacaacgacaactgccgcaaatcgtaagttacgtccaccttttacaactttcgttactcggttgatttcaaccaaacgatcttctaggtctaatgttgaaggatcaatgtttgataccatagtctattttcctccttttgcttaaaagtctagtccattttcacgggctgcatctgctaaagcttggacccggccgtggtatttgtaaccgccacggtcaaaaacgacttgttcaatatcgtgttctttagcccgtttagccactaattcgcctaccaaggcagcttgttcagtcttgctttcggaattggaaacttcgctgtccaatgtagatgcacttgcgagcgttacaccctctacgtcatcaataacttgagcgtagatgtttttgtttgaacgaaagatgtttaaacgtgggcactcagcagtaccagaaagattgcgacgaatccgtttgtgtctttttttacgcactttatttttatctggttttgaaatcacaattgtcacctctttattttattttgcctggcaatagaagaccatcgtccagtcttgcttattcactagcctatttaccagttttaccttctttacggcgaatttgttcatcggcgtatttaatccctttaccttggtaaggttcaggtggtctaactcctctaactttggctgctagttggccaaccgcctctttgctagcacccttaatgacgatttcggtgttagatggaacttcaatctcaataccgtcgggctgttcgaattctactggatgggatagtccaacatttaagaccaatttgttcccttgtttttgggcacggtacccaaccccgttcaattctaattttttgctaaacccattggctaccccttcaaccatgttaaagactaaagaccgggtagttccgtgggcaatacggttagctttcgaatcattgggacgttcacaaacaatgtcttggtctgacacattaatctcaatacttggactgagggtacgagtaatttcgccctgtttccctttagctgtaaggacgtttccctcttttaaagagacttcaacgccttctggaatattaataggtttatttccgatacgactcactgaccggcacctccttaataaataaattgtttaccaaacgtatgctaatacttcgccaccgatttttttagcacgagcttctttatcagtaacgacaccttgggaagttgaaataatagcaatccctaagccatttaagactttgggtacttcttctgcattagcatagacacgtaagccgggtttagaaatacgtttgatccctgtaatgacccgttctttatcttgtccatatttcaattggatacgaacaacatcctgcttattgtcttcaatgacttctacatctttgacaaaaccttcagctttaaggatgtcggccatactttttttaacattagatgcagggatttccacactttcgtggtgtgcatcactagcgttacgaacgcgagttaggaaatctgcaatcggatctgtcatgaccattcaaagtagcctcctttatcagtaatattatttttaccagcttgcttttttaaggcctgggatttgtcctttatgagcaagttcacgaagacaaacacggcataatttaaattttttgtagacagcatgaggtcgtccgcatcgttggcaacgtgtatattcacgagtagaaaattttgctggttttttagctttttcaatcattgcttttctagccatttcgttataacctcctatttttattttctaaatggcatgcccaattctcttagtaattcgcgtccttcttcatcagtgttagctgatgtgacgatcacaatgtccatgccgcgtactttattcacttcatcaaagtcgatttcagggaaaatcagttgctctttaattcccagagtgtagttccctcggccgtcaaaagagttttggctgacgccgcggaagtcccgcacccgtggtaatgaaatcgtaactaatttgtccaagaattcgtacattctttgactacgcaaggttactttggtaccgattggcataccatcacgtaaacggaaagctgcaatagattttttggccttggtgacgacaggtttttgacctgtaattttagtcaagtcttctactgcatcatctaggtttttagtgtttgcaactgcatcaccgacacccatgttgacaacgatcttgacaactttgggtgcttccataatggaagtatagtcaaatttatccattagtgatgggcgtacttcgttttggtatttttcacttaatcgtgacatctttacttgtcctcccttcgctataagtttaattaaacttgtttgccagattttttagcgtaacgaacttttttgccgtcttcaaaccggtaacccactcgagtcggttcaccagtttcagggtcgactaactgaacgttggaaacgtggatcgaaccttcttcttcaacgatcccaccttcgactcccatgccaggtcgctggtgttttttgatgatattcaagccttcaactttgactcggtcttgtttgggcaaagcttcaataaccgtaccttgtttccctttttctttaccagagattacttgtaccttatctcctgtttttacaaacatgtctcgcacctcctaaaccatctattcttataatacttccggagctaacgaaataattctcatgaagttgctatcacgcaattcgcgggcaactggtccaaaaatacgagttcctcgaggtgccttgtcttcacgtacgattacacaagcattctcatcaaatttgatatatgaaccatctggacggcgcaagccagtttttgatcgaacgatgaccgctcgagctacatcaccttttttgacaacgccacctggtgtagcatttttaacactaacaactacctcgtcaccgatattagctgtcttagcacctgaccctcccagtacttttacaaccagtacttcacgggcaccagagttatcagcaactttcatacgactttcactttgaatcacgttagaatcctcctttcaactcagacatgccagccttataagataactgcttcttcaactacttcaactaaacggtatcgtttgtctttggaaagtggacgagtttccatgattcgaacagtgtcgccttctttggcagtgttattttcatcatgtgccttaaatttagttgagtattttattcgttttttgtatttagggtgttcgcgggttgttctgatttcaactacaatggtcttatccattttgtcagagacgactttacccacatactctttacgcaaattgcggtcagccattctttaacctcctttgatcaaactagggaaatgtttattgggcaagttctgcttgtcttagtacagttttcacacgagcaatatttttccgaacttttttgatttgagctgtatcttccaattgtcctgttgccagttggaagcgtaagttaaagagttcttctttgtactctgcctctttctcaagtagttcagcagtggataattctttcaattctttagccttcatgtgattcaccactttcttcacgagctaccacacgagttcgcactggcaatttcatggaagcaagtctcaaagcttcgtgagcgacttcttccgaaacaccaccgacttcgaacatgattttaccacgcttaactggagctacccatttttcaggagcacctttaccggaacccatccgaactccgatacctttagcagttactgatttatgagggaaaattttaatccatactttcccaccacgtttcatgtatcgggtcatagcaatacgggctgattcgatttggcggttagagatccatttggagtcaagtgactgcaaaccgtattgaccgtaagcaacttctttaccgccttttgcttcacctttcattttaccgcgaaattcacgacggtacttcacacgtttaggtactaacattgattattttcctccttcctcgctatcgtcaatttcaggaagaacttctcctttgtagatccagactttcacacctattttaccaaattgggtatccgcttcgacgttatcgtagtcaatatcagctcggatagtgtgaagaggaacggtcccttcagagaatccttctgaacgagccatatctgcaccgtttaaccgaccagcaacaagtgttttaatcccttgagcgccatcacgcatagctctttggatggcttgtttttgtgctcgtcggaatgaaatacggttttcaagttgttctgcaatcgatttagccactagtgttgcatcaatatccggttttttcacttcgatgatgttaacgtgaacgcgtttgccagttaagttggccaattggtttcttaaagcgtcaacttcagaaccacctttaccaatcaccatacctggtttagctgtgtggatcgaaatgttgacccggttcgccgcacgttcaatttcaacgcgggaaactgaggcatcaactagtttgtctgcaatatagtttcggatagccaagtcttcgtgtaatttgtctgcaaaatctttttcagcataccactttgcgtcccaatcgtggataacgccgacacgcaagccgtgtggattaattttagatcccatgctttaaccctccttcttctcagataccacaacagtaatgtggcttgttcgtttattgatttttgaagctgcacctttcgctcttggacggaaacgttttaaggttggtccttcattggcatatgcttcactgacaaataagtcttcgacattcatatcatagttgtgttcagcattggcaatagctgattttaagactttttctaccgcttcagctgcacctctattggtaaatcgaaggatagcaattgcttcaccagcatctttgccacggatttggtcaacgactaagcgaactttacgtggagcaatacgaatcatacgagcagatgctttagcttctgttaccttgtctgtcatgatttttcctccctccgattattatttcttagtcacgcggtcatctttactgtgacctctaaatgttcgagttggtgcgaattcacccaatttgtggccgaccatatcttcttgaatgtagacagggacatgtttgcgaccgtcataaacagcaattgtgtgcccaacaaagtttgggaaaatagttgaacgacgagaccatgttttgattacttttttattgtcatcgtccatagcctttacttttttcattaagtgatcatcgacaaaaggtccttttttcaagctacgacccatgttacgccctccttacgggaaaacccatttattcttttcagattatttgcttcgttttttagttcggcgacgacggacaatcaatttatccgacttgtttttgcccttacgtgttttcttaccaagggttggtttaccccaaggtgaaactggacttggtcgaccgattggagcacgaccttcaccaccaccgtgtgggtgatcgttcgggttcatgacagaaccacggacagtaggacgtttgcctttccaacggcttcggcctgctttaccaaagttaatgagttcgtgttgttcattcccaacagagccaattgttgcccggcagtctgctagtatcaagcggttctcgccagaactcaacttaacaagcacgtatttcccttctttaccgaggatcttggcacttgaaccagcagatcgagcaagttgtccacccttgcctggttttaattcgaggttgtggatggtagtcccaactggaatgttagccagtggcaaagcattccctactttgatatcaacatcttcaccagagtagatttcttgtccaactttaattcctttgggtgctaggatgtaggttttaaccccatcatcatattggaccaaggaaatattagctgaacggtttgggtcatattcgactgttttaacaacaccgcggacactatcttttcgacgtttaaagtcgatcacacggtatttgtgtttgtggcctccgcctttgtgacggacagtgattttaccagcattgtttcggccagatcctcttttttgtggttctagcaagcttttttctggtttgtgagtcgtaatttcggagttatcgagcgtagtcatattacgacgtccattagtgatagatttataacttttaatcgccacggtcttcccctccttaatttgttttcaatgttttattcttcttcgtcaccaaaaacatcaatttcattagatgtttcggttaggctaacaatagctttacgtttgcgtttagtgtaaccattgtagcggcccattcgtttaggtttacgggcagtgttgacgatattaacttttaagacgtcaacatcaaataattcttcgacggcttttctaacttgaactttcgtagcacgagcgtccacttcaaatgtgtattttttatcttccatagcatacattgatttttcagtgatcactggtcgcttgatgatatcatgtgctgacattattgaagtgcctcctctacttgttccagagcagcctgggtaaggattaagtcgtcatggccaacaacatccagcacagatacattatcaggggctactactttaactcctggaatatttcgtgcggatagggcagcaaattcgttgtctttttctaacacgactaatgctttgcggtcgacgtctaattggtcgagtagggctctgaaatcttttgtttttggtttatcaaattcgagtttgtcaatgacagatagctctgaatcaataactttttgtgaaagtgcagataaaatcgctaaacggcgaactttcttcggtaatttgtagctgtaagaccgtggagttggtccaaatacgacaccaccgccacgccagattggtgaggtgttggatccgtgacgggcacgaccagtccctttttgacgccatggtttacggccaccaccacgaacagcacttcggtttttaaccgagtgagttccttgtcgttgtgaagcttgttgcatgataatggcatcatacaagacgttatcgtttggctcgataccaaagattgcatcgtttaaagtgatttcaccattctcttttccttcttggttaaatacggttactttaggcattggttaatcctcccttcctagtatatttagtttgattttttagcagttctaatttcaactagggattttttggcaccaggtacattccctttgatcaagagaacattgcggtcagcgtcaacgcggacaacttctaggttttggacggttacttggttaccacccatacgacctggcaattttttgcctttgtaaacacgagatgggtcagcagccatggccatagcacctgcttttcggtggtagtgagacccgtgactttcaggaccccgactttggccgtggcgcttgatggcaccttggtatcctttaccttttgatgtaccggtgacatcaatgatgtcgccttccgcaaatgtttcgactgtaatttcgctaccgacttcaacctctcctagctcagcatcacgaaattcgcgaacgaagcgcttaggagcagtatcagcttttttaacatgaccttgctcagcctggttagacaaaacatttcgcttgtcatcgaaaccaacttggactgcatcgtagccgtctgtttcggctgttttaacttgcaagacaacgtttggtttagcttcaacgacagtaacgggtactaattcaccgttctctgcgaaaatctgtgtcataccgacttttttccctaagattcctttggtcatgattacacctccatatttaatatagttaatttagtctttatagtttaatttcaatgtcaacaccagatggtaggtcgagcttagttagggcatcgactgtttttggtgttgggttaacaatatcaacgactcgtttgtgggtacgcatttcgaattgctcacgtgagtctttgtgtttgtgtggtgaacgaatcactgtgaataattttcgttcagttggcaatggaatagggcctgcaacgttagcacctgttctttctgccgtttcaacgattttagacgctgattgatctaacacgcggtgttcgtatgctttcaaacggatacggattttttgttttgccatgttattccctccttcgcttactttaaaaataaactggctccatgaaaatttccgcacacccttcacatggcaatgcatccgggtgtgtcgcaacctctcacttcttagcctactatctatgaatcgcacccctgtgtgggtgtttcatggtttttagcagcttcaatgggcatgctaaaaaagcttttctcttccatagacactcttgacattatacagactctgccgggcactttcaagtttttcttaaagttttttcgttatttttgccaagggttcggttagggcaggtccttctttatataatagaagagaacccagccaagtatgctaaagcatatgtggctgggttctcggactaagcttatccatctgttagagtataatacttatgtgacacaaaaccattaaaaagaggatgcttctgctatactgaagttagcacccaacagaaaggaagcaccctcggatggctattataacaaaagaaatgcgctatcgtgaaaaagttgtaaaatatgcgatcaaacagggcaacaatgcccatgcagctctccgttaccacaccaaccggatgtaggtcaaacggtggcgagacccttatgatggcacggtcgaaagtctgcgaaaccagtccactcggccccatagccatcctcgtcagcaccaagctgagacttgaagggaattggctcctaaaagtaggccactgactgctagggagaccgtcagccactgaccatttttcttgcgcagtaacttcatacaagcacaccttctttatgtatttttaatatgaatactattatatatggctcatatagaattcatatatatttattataggcaaatatcattaaagttcaataataatatatcttattcttgaaaaattattttgataaagcaacttttattttgctgctatgataggatttaaacctagttcctgttataagaccgctttccttccttcaattaccttctcatttcaatcacaaaatcacccacataaaaaagcaagcccgggctaggcttgcttttccatctatattatatggtcaaaaagtatagcttactttttctttaacaaaaattggtggaggttatttaaccccttggtcaagacttccacttctttagggtctaaaccagtcaaggtttcttccaccatttcctggtggaagtctttatggacctggtagatggcttggccacggtctgttaattggagtaggacgacacggcggtccttgtccgatttgactcgtttaacgtagccttttttctcaagaccctggatggctacggtcaaggtccctggggtgactttcaggtttttagccacctggttggagctcaaacttccatcctgggcgatggcttcgattgtatgcatttctttaagggttaaatccgaaaaacggctctttttgagtaccctttcttgaatttcaagaatctcattaaaaatcaaaaccagttggtcgttgacgcggtttactctatcctggtccatgtccttacccctttaataacagattcacttgcctaacaagttaggtctcgccatagataattctattatagcacagactaagactaatgaaggataagtttggatcgggcttcgtccggtaaaataagtaaaaaaagcaactggctcaaagccagttgctttaattgatcttttttattcgataatttcagaaacaacaccagcaccaacagtacggccaccttcacggatggtaaatttggtaccttcttcaactgcgattggagcaatcaattcaacttccatttcagtgttgtcgcctggcataaccatttcagtaccttccggtaggttaacgacaccagttacgtcagttgtacggaagaagaattgtggtcggtagttagagaagaatggagtgtgacggccaccttcatcttttgacaagacgtaaacttcgcctttgaatttagagtgaggggtgatggaacctggagttgcaagaacttgaccacgttcaacatcgtcacgtgaaagaccacgtaacaaggcaccaatgttgtcaccagcttcagcgtagtctaacaatttacggaacatttcaacaccagtaacagttgtagtcgcagtatctttaataccaacgatttcaacttcgtcaccaactttaagttgaccttgttctacacggccggttgcaacagtaccacgaccagtgatagagaagatgtcttcaactggcatcaagaagtctttgttagcgtcacgttctggcgctggaatgtagttgtctacttcatccattaatttaaggatgttattcatttgttcttcatcatcttgaagagcaagaagtgcagaaccagcaacaactggaacttcgtcacctgggaagtcgtattcagttaagaggtcacgaacttcaagttcaacgagttcaagtaattcttcatcgtcgacttggtcaactttgttcaagaatacaacgaagtaaggaacaccaacttgacgagcaagaaggatgtgctcacgagtttgtggcattgggccatctgcagctgatacaactaagatagcaccgtccatttgagccgcaccagtaatcatgtttttaacatagtcagcgtgtcctgggcagtcaacgtgggcatagtgacggttttcggttgagtattcaacgtgagcagtcgcaatggtaataccacgttcacgctcttcagcagcaccatcaatttggtcgtaagctgaagcttctgccaaaccttttttagctaaaacgtaagtgatagctgcagttaaggtagttttaccgtggtcgacgtgacctagggtaccaatattcatgtgttctttggaacgatcaaatttttcttttgccatgtttatttttcctccttaaggaactttatttacttaatttaacatgagcacatgaacccatttggggtaattataccgttttaaaaacgatagttcaacttctagccccaaatggaccaggctcaatctggcgactagtgcctagttggaactgccaccgtgttgtttaataatttcatctgcaatacttgatggaactggtgcatagtggtcaaattgcatggtgaaggttccgcgaccttgggtagcagaacgtagagttgttgcgtaaccaaacatttgagataacggaatggatcctttaacaatcaaggcattgcctcgaggggtttggccttcgatttgaccacgacgagctgaaatgtgacccatgatatccccaaggtattcttcagggatagtgatttcaaccgccataactggttccaagataacaggctctgcttgttttgctgcattacgcaaggctagagaagccgcaaccttgaaggcagattcactggagtcgacgtcgtggtaagagccatcatatagtttggccttaacgtcaaccagtgggtaacctgctaagacaccattttccatggcagcttgcaaaccggcgtcaacggacggaatatattcacgtggaacgacaccaccaacaatggcatcttcgaattcataaccttccccttcatcaagtggagtaaattcgacccagacgtgaccatactgccctttaccaccggattgacggacgaacttaccttctgcttgaacagattttgtgaaggtttcacggtaggatacttgtgggttcccaacagttgcttctaccttgaattcacgtttcaatcggtcgacgatgatatccaagtgcaactcacccataccagcgattagggtttcgccagtttcgtggtcagtctcagctctgaaagttgggtcttcttcagccaacttagccaaggcaacagacatcttgtcttggtcagccttggatttcggctcaatagcaacctggataacgggttcagggaattccattgactcaaggatgacaggatcatcaatatcagacaaggtgtccccagtccctgtatctttcaagccgactgctgctgcaatatcaccagagaagacttctgggatttctttacgggagttggcgtgcatctgcaagagacgaccgactcgctcccggctgtctttggttgcattcaagatgtaggaaccagcttctagggtaccagagtaaactctgaagaaggttagacgacccacataagggtcagtcatcactttgaaggcaagagctgagaaagattggtcatcgccagcttcacgggtgaccactgtatcggggtcatctttcacgtgtccctcaatagctggtacgtctgttggagctggaaggtagtcgacaatcccgtttaataggagttggacacccttgtttttgaaggctgaaccacagaagcatgggtaaaattcaacgtccaaggttgcttgacgaatagccgcttttaattgttcagttgaaatttcttccccttccaggtatgctaccatcaagtcttcatctaactcaactacagcttcaacaaggcgttcgtgctgttcttgagcgagttcttgcatatcttctggaatttcagcttcttcaatatcagttcctaattcattaccgtagtagtaagctttcatctctactaggtcaacgattccttcaaagtcatcctcagccccaattggcaattgaacggggtgggcattggcttgcaaacggtcatgcaaactgtcaaccgcttctaagaagttggcacccaacttgtccattttgtttacaaaaacaatacgtggaacatggtaggtggttgcttggcgccaaacggtttcagtttgtggttctacacctgattgagcatctaagacagtcacagcaccgtctaagacacggagggaccgttcaacctctactgtaaagtccacgtgtcccggggtatcaataatgttgatacggtggtctaaccaggaagtagtggttgcagcagaagtaatggtaatcccacgttcttgttcctggtccatccagtccatctgggcagccccttcgtgggtttcaccgattttgtggatccggcctgagaagaacaagatacgttcagtagcagtggtcttaccagcatcgatgtgcgccataataccaatgttacgcgttctctctagaggatattctctttttgccacttaatctacacctctctgtaatagtcttctgtcaatttagtactacaccactatagctaagtagtgtaaatattgggtaaatacaagattaaaattaagaaaattaccaacgatagtgggcaaaagccttgttagcttcagccatacggtgtacttcttcacggcgacgtacggaagcaccggtattgttagcagcatccataatttctttggctaggcggtcttccatggtatattccccacgcaaacgagcgtagttgactaaccaacgaagggccaaggtagttcgtctggcaggtctgacttcaacgggtacttggtagtttgaaccacctacacggcgggctttaacttccagtacgggcataatgttttcgagagcttgctcgaaaacttcaactgggtcattgccagtttcttcttttactttgtcaaaagctgtatacaagatagtagaagctttccctcgtttaccatcgaccatcaagcggttgattaaacgagcaacaagttttgagttataaatgggatctggtaaaatatcacgtttctgagctggtcctttacgagacatctcatgtcctccttccgattcatctatttagtctagtttcttgatttagctaggttttttagtaccgtatttggaacggctggatttgcggtcgttaactcctgcagtatccaaggcaccacgaacaatgtggtagcgaacaccaggtaagtctttaacacgaccaccacggatcagaacaacggagtgttcttggaggttgtgaccttcaccagggatgtaggctgtcacctcaatttggtttgacaaacgaacacgggcatacttccgtaaggctgagttcggtttcttaggggtcatagtcccaacccgagtgcagacaccacgtttttgaggagagtaaacagttgtttgtttccgtttcaaggtgttgtatcccttgttcaaggctggtgattcagtttttgacaatttagatttacgaggcttacgtactaattggttaatagtaggcatcttgtatgtcctcccttcctattttttgaataatctctagttccacatgtccaggtgttcctttttgcgaaaaaaatatcgagctggttaatcacctggctatggtatggcttgagcccttgcctggcaagcctgcaacgatcatccgacacacccgaataacacttgccgatattgcaaaagcactcttagtatattagcacacttgggcactagtgtcaaagaattatccgaaattattttaccactcctaccctgatttgcaaggcttttttctgtttttttgccagcgaaatttgacatggttgaccaagcagaccggtttataaaatagaaaaagcaagcccaaatttgggcctgcttttctcactctagcttatttctcgctagtttcttcagtttctcggttttcttcttgactgacttggtcttcttcattgatgctgtagacattttcgctaacgacaccaacttttttaggttcaatattactgtaggctctcataccagtaccagctgggatggatttaccgataataacattttctttcaagccaaccaggtcatcaactttaccgcgaatagctgcatcggtgaggacccgggtggtttcttggaaggaagctgcagacaagaaagagttggtttcaagggaggccttggtaatacccagtaggaccagtctagcagttgcgggttggccaccggacatcaaggtttcttggttgcgttccttgaagtcgtggaggtcaatcatggtaccaggcaggatatcagtgtcccctggttgcaagacacggactttacggagcatttgtcgcaccataacctccacgtgcttgtcaccaatttcgaccccttgagaccggtaagcgtattggacttcttgcaagaggtatttctgcaatttcatcatatcactcaccgcgagtaactctttcggatcaatagacccctcgtttagagcatcgcctcgttcaacataatccccaacttcaaccttcatccgggcattgattggcaaggagtagtcacgttggtcaacattccccttaacagtgacggtcttagtgcgttcttcagggtcttcaacgatctcttggatttgaccattcacttctgtaatggtggcttgccctttcggatggcgggcttcaaagatttcttgaacccgtggtagaccttgggtgatgtcgtccccagcgaccccaccagtgtggaaggtccgcatggtcaattgggtaccgggttccccaatggattgggcagcgatagttccaactgcttcaccaacttcaacttcccggccagttgccaagttacggccatagcagtgcttgcagacaccgtggttggtgttgcagcagaaggcagaccggatagtaacttcttcaataccggcatcgacaatttttcgggttttgccttcatcaatcaattcatccttgtgaacaatgacttcaccagtttcggggtgggtgacggtttcttgggcataacgacccaagatacggtcagacaagctttcaatctgttcatttcctacttggatggcagaaactttaaggccacgtttagtgccacagtcttcttctcggatgatgacgtcttgggcaacatcaaccaaacgtctggtcaagtaaccagagtcggcagttttaagggcggtatcggtcatgcctttacgggcaccgtgggtggaaataaacatctctaagacagacaggccttcacggaagttagacgtgatcggcaattccatgatctcaccacttggtgctgccatcaaaccacgcataccggctagttgggtgaagttggaaatattcccacgggcaccagagtctgacatcataaagatgttatttcttgggtcaagggaatccatcaaggcatcttgaatttcatccttagccttttgccagacatcgataacgttgtcgtaacgctcttcttcagtaattaaaccgcggcggtgggtggcattgattttatcaaccttggcgtgggcttctttcaggatttctggtttagcttctaggactgaaacgtcagcaatcccaacagtaataccagaccgggtagagtacttgtagcccaagttcttcatgcggtccaacattttagaggtttcggtcacttggaagttattaaagacttcggcgataatgttggacaggtcttgttttttgaaaggctgaactaaaggacggtcggcaataaggtctttcaagttttggccccggtcgacaaagtacttgtctggggtttgctgttccaggttaaccttagatggttcgttcaagaatggaaattctgctggcataatttcattaaagataatcttaccgactgtggtaatcaagtacttgtctttctgccagtcagtaaaaggtttgtccggtaagtccaccgcacggatcgcaacccgggtgtggaggtggacatagcctgtttggtaggcttggatagcctcagaagcactggagaagacagttccttcaccaattttaccttcttcttccatggttaggtagtagttccctaggaccatgtcttgggaaggggtaacgactggttgaccatctttagggtttaagatattttgggcacccagcattaagatgcgggcttctgcctgggcttcatcactgaggggtacgtggacagccatttggtctccgtcaaagtcagcattgtaggcttcacaagcgagtgggtgtaagcgaatagccttcccattgacaaggacaggttcaaaggcttggatccctagccggtgaagggtaggggcccggtttaagaggacagggtgttctttaatgacatcttctaaaacaggccagacatcatcttccatccgttccacttttcgtttggcatttttaatgttatttgcaatatctcgctcaactagctcccgcatgacaaaaggtttgaagagttcgatggccatttctttcggtagaccacattggtacattttaagggttggcccaacaacaatgacagaccggccagagtagtcaacccgtttccctagtaggttctgacggaagcgcccttgtttccctttcaacatgtgagaaagagatttaagcggacggttaccaggaccgttgactgcccgaccgcgacgaccattgtcaatcaaggcgtcaacagcttcttgcagcatccgtttttcattttggacgataatgtggggggcattcaagtcaagcaagcgtttcaaccggttgttccggttaatcacccggcggtacaagtcgttcaagtcgctggttgcaaaccggccaccttctagttgtaccattgggcggagttcaggtgggataattggaatagcatccaagaccatccattccggtttgttgttggaagacttgaaggagtcaataatgtctaaacgacgaatagcccgggtccgtttttggccagttgcagtttctaagatttctttgaggtcagcaacttcttgttccaaatcgacattttttagcaaggtccgaacagcttcagctccaatttcagcttggaattcattgccgtacttgcttttgttttcccggtattcacgttcagttaagagctgtttgcgttcaagcggggtatccccaccgtcaataacaacataagaggcaaaatagataatttcttccaaggatcttgggctcatatctaagataaggcccatccgacttggaatacccttgaagtaccaaatgtgggtgacaggagctgctaattccaagtggcccatgcgttctcgtctgacactcgacttggtgacttcaacaccgcaacggtcacaaactatccctttatagtggactcgtttatattttccgcaagcacattcatagtccttggttgggccaaaaatgcgttcgcagaacaaaccgtctttttcaggttttaatgtccggtagttaatggtttcaggtttcttcacttcaccatgagaccatgaacggattttctctggtgaagccagtccaatttgaatactttcaaaattatttacatctaccaagggggcaaacctccctttatttcatttgagctgccctaagctcattgtaagcaagcgacaagacgccttgccgcttgcctacaagtaaaatctactatccttacgactcagtacttggctcttctttttctttttccttacggcgttcttcttcctgctctttacgcatttcttctagggaatcaacgacttggtcttccgactcgtcatcttcagccttgagattgatttcgttttgttccttgtcgaggactttcaggtccaaccccagagactggagttctttcacgaggacacggaaggattcaggtacaccaggttttggaatgcgttggcccttgacaatggcttcataggtgtctacccttccaatcacgtcatctgacttgtaggtcaagatttcttggagggtgcgggaagccccataagcttccaaggcccagacttccatctcaccaaagcgttggccaccaaactgtgctttcccaccaaggggttgttgggtaaccaaggagtatggtcctgtggatctggcgtgcaacttgtcgtcgaccatgtggactagtttgataaagtacatcaccccaacggagaccttgttgtcaaatggctcgccagtccggccgtcatacaagacggttttggcatctgcatccataccggcttccttgatagtttcccaaacatcttcttcgttggccccgtcaaagactggagtagcaatgtgctcgcctaactgtcgggctgccatccccatgtggagttcgatgacctggccgacattcatccgggaagggacaccaagtgggttgagcatgatgtcaattggggttccgtctggcataaacggcatgtcttcttctggtaagataagggaaacaacacccttgttcccgtgtcgacctgccatcttgtccccaacgtcaattttacgtttttgggcaatgaaaactcggacaaggtagttaacgcctggtgacagttcgtcgccggcttcccgggtaaagatctggacatcgtggacaattccgccactaccgtgtgggacacggagggaggtgtcacgaacttcccgggctttttcgccgaagatagcgtggaggagtttttcctcagctgatagttcactaacccctttgggtgtaactttaccaactaggatgtccccgtcacgaacttcagccccgatccggataatgcctctttcatccaagttcttgagggcactttccccgacgtttggaatttcccgggtgatttcttctggccctaacttggtatcgcgggcttcagattcatattcttcaatgtggatggaggtataaacgtcatctttgaccaaacgttcactcataatgacggcatcctcgaagttgtagccatcaaaggtggtaaaggcaatcaatgggtttttaccaagggccatttcaccattttccatggacggaccatctgctaggatgtcgcctttgtcaacttcctcaccagtttttacaattggtctttggttgtaagaagttccggagttggaccgtttgtacttagccagcttgtagttgttgagggtaccatcggcttgacggactttgaccgtcttggcatcaacatactccacaaccccgtcagccttggcaataacggcagctccagagtcacgggctgcaatgtgttcgattccagttcctactagtggggactctggttgcataagaggaacagcttgccgttgcatgttagcccccattagagcccggttggagtcgtcgttttctaagaaaggaatggaagctgtggccacagaaacaacttgttttggtgacacgtccatatagtcaacttcggaagcgtcaacctcttcgttgacatcccgtcttcgggctaggacgacatcattagcaaaatgtccatcttcatctaattcagcattggcttgggctacaacgtaaagatcttcttcgtcagcagtcaagtagtcaattttatccgttacctggccagtttcccggtccacccggcggtaaggtgtttcaataaaaccaaatttattgatcttagcataggtagacaaactgttaatcagaccaatgtttgggccttcaggtgtttcgatcgggcacatccggccgtagtgggaatagtggacgtctcggacttcataaccagcccggtccctagtcaagcctcctggtccaagggcagacaagcgacgtttgtgggttaactcacccaaggggttggtttggtccatgaattgggagagttgggaagacccgaaaaattctttcagagaagctacaacgggacggatgttaattaattgttggggtgtggtgctagaaatgtcttggatggacattcgttcgcggaccacccgctccatccgagagagcccaattcggaattggttttgcaaaagctctccgactgaccggatccgacggttacccaagtggtcgatatcgtcaacatcgccaatgccttcttggaggttaaagaagtaactcatagccgctatcatgtcagcaggggtaatccatttggcctttttgtcagggtgcccgttgccgatcatgttcacgatccggtctggatcttctttggagtagactttgacaatttgtaggtcaatgggttcagggataaccgcttcttctgaggggttaatggttacttggttcatgtcaccgtcaaggtaagggccaagcttgtccatcacagaccgggtcacttcactaccttcttcagctaagacctcgccagcttcaggatcaaccaggttttcggcaaggacagtccccatcaagcgggttttaaggtctagttttttgttcatcttgtagcgaccaacataggctaggtcgtaacgcttgtggtcaaagaaccgggtattgatcaagttacgagaggattcagctgttttgggttcacctggacgcaagcgttcatacaagtctttcaaggcttcttctacgcgggaatctgaagtagacttgtggacatccttttccaaggtggcttccaagctgtcattcaagccgatcaggtcaataatttcatcatctgacccaatccctagagctcttaacaagacagtgatcggaattttacgggttcggtcaattcgaacattggagatgcctttggtatctgtttcgtattcaagccaagcaccccggttagggataagaacggttgaaaaaccttcccggccgtttttctcaacttttggactgtaataaaccccaggcgaccggacaagttgggaaacaatcacccgctcagccccgttgatgataaaggtcccttgttctgtcattaacggaaagtcaccgaagaagacttcttgttccttgacttcaccagtttccttgttgatcaaacgtaacttcacgtagaggggggcagaatagttcgcatcatgctctctagcttcttcaacagtatacttgctttcgtaaaatttatagtcaacaaattctagggacaaattgcctgaaaaatcatcgattggggaaatatcactaaacatttccttcaagccttcatctaaaaaccaatcatatgaatcagtctggatttcaattaaattcgggagctcgagtacttcgttgattcgtgagtaacttctacgaacacggtgtttaccaaaattaacttttttaccgaccaacttgttcacctctcataaatattgatggggtaaataaaagtgaatgttaattaaatgtaaaaaatattacatttgtataacaattcgtttgttgccctccttttaagcacaaaaaaagacaaaagaaccgagcaagaattccccttttcctcaattacttttgcttatcaacaaaacctctgcggacaatatttcgcaaagacttctatttactgtcatcgatgtgcttaaatattatataggaaggctaggatgaagtcaaggactttcttcaattattttcaattaaaaaggctggcccaacagccagccacccttctttatttacttgtcttttaagtagtcgccttggaagtcctggtctttgggcaggatgaggttgaggacaatcccgaccaaggcactaaggacggtccctgacaaggtcacaagcccaatatccaaaactgctccgccaataccgataactagcatggcactggctatgattaaattgcgaggcttattgaaatcagttcggtcttcaatcatcaccttgagtccggaacttgcaatcaccccgtagaggatgatggacatgccccctagaacagggtcagggatggtggaaatcaaggcagtaaacttgcccaggaaggaaataatgacggccagtattgccgcattgcggacaaccgaaaccgaggcaatccgggtcatgccaataacccctacattttccccgtaagtggtattggccggtccaccaaagaaggcagatagggctgtcgccagaccgtcccccatcaaggtccgggtcaagccgggatcgtcgataaaatccttcttacaaatttcacctagcatagcatggtctccgatgtgttcagcagcagtggccaaaacaagggggaggatagcccaggtctcagggccaaagtaaaggtcataggagtgaaaggcttgggtctcaaagggaaagtaaaattctggtagggcgaaccagtctgcttctgccaccggactaaagtctaccagacctaaaaggacggctaccaggtaaccagccactacacctaccaagaaggggataattttcataaaacccttggccttggtattgacaaaggcagtgactaaaaaggtgactagggccactaagatctcccgccaagacccaccagtgacaaggcctgagttttcaatggcagtagccgacaagccgagcccgatcaccataatcatcgggccaattacaatcggcggcatgatccggttgagccagtcagttccaaagacggcgataagaccagcaatcaagacataggccaaaccggtcaaaataatcccagtctgggaggcagacaagtccccacccatctgctggatagcaatttgcatggccgaaatataggcaaatgatgaccccaaatagaccggcaccttttgctgggtcaaaaactggtaaaccaaggtccctaccccactggcaaagagggcaaccgaaaccggaagaccaaccaccaaggggactaaaatagtggccccaaacatggcaaaaatgtgctggatactgagcaacaaccccttgccagttgacggcttgtcatagacatctaagatgagtcctgcttgcttactttccatatttatccatcctttacttaaaaattgggggataaaatgcacaaaaaagaaggccattgctgggcaatgaaccttacaaatgctcgggagtctcctctacctggaggccagtccaagctatgctgattttttcacctaggccatcatagcaaatcgagccaggcttttcaatcctattttaaagatttcgagactcactgaaggccagttatcccgagcttcaagacctagctaggattcggctttacttttttgccggtcgtggttgttgcgggtggacacattcaagaccaggccaatggcaaaggacagaatcatcaaactcgaccccccataacttaagaagggaaaggtcaaaccggtaataggcaggaggccaaccaccccaccgatattaaagagggactggatgacaagtaaagtgccgataccaaagcagataagactacgaaaggcctttttagagtggatgccgattaagaatatccgcagaacaatcaaggaaaaacaggctaagacgagcaaaagtccaataaagcctaactcttctccaacaatagcgatgataaagtccgtataaggaaaggggaggtagccagtcttttggatactgttacccaagccaactccgccaagaccgccccggctcaaggcatagtaagagttaaccaattgtaaaccgtgggagtcagccaaggaaaagggatcccaaaaggcttggaaacgttcatagcggtagccggagatgagggggagtttgtccccaaattgccggatcaagagcatgagaccagccagtatgccgacccctgcagccgagaagcctagcccaatcttaatggggatcccactagcaaagatcataatggtcaccgttcccaggataatgacagtcgtcccggtatccggctggaagaagatgagggctgccatcagcaagatgatcaggaggggctttttgatcgacccgaaaaacgaagacaaatcggaggtctcccgtttggacaagataaaggccatgtaccaaaccgccaccaccttggcgatctcacccggctggatattgacgatggggaagggaatccatcttttagccccattgatttcccgaccaaagaccaggacggcgaggagcaagagggttgtcattgctacaatagccatgaccgtttttttgttgttaatttttttcaaggaaatcgaggccgtcaccgccatgatcacaatgcttaaggtcacatggacagcctggcggatgaggtagtaggccgggttgccctgggactgcatggcagaatagctactggcactgaagaccatgacaatgctaaagatcaccatgaccaggtaggcaaagaggaggtatttatccattaatttatagcggtttttaattccctgaatcatgacactcttcctttaatttcattctttgcctggtctattttttaaccggtagcgggaccgtctctcccctgaataataatgggacttgtggtggaacttcatcgacatgatgagaccgaccccgagtaagttgccgaccagggccgatcctccttgggaaataaaggggagggggatcccagtcaaaggcatcaagccaatattcatgccgatattttctaaaatgtgaaagacgatcatcataataatcccagtcgcaatataggaatagaattcattccggatatcaaaaataaccttgaccatgttgtagatgagtaggaaatagacaaaaataacgatagaagtccccacaaaaccaaacatctcagcaatggaggcgataatcatgtccgattcccggactggaacatagacttcagacacaccaaagcccttaccgataatcccgccagacccaattgccttgaaggcctgggtcacttgataactgtaggaactcatgtcttgatgggggttgagccaggtatcaatccgtctgaattggtattcatggaagcctaagacatcaacgagaaagtctctttggtagatggctaaaaggacaaagcctaccccaaagaccaggataaaaataataatagggagcaagatacgccagcgaataccggacaagagaacaatcccagctgctatggcagcaaaggccaaaccggtccctaagtcgggttgcattaggactaagaacaagggcggagctgtgtaaaggataattttacctaataagaaaaaatctgacttgttggtatgaaccttgtatttgtggttgtgctccgttaccaccttggacaacatgaggataaagggaattttgacgaattcagtcgactgaatagtcatcccaatcccaggaatactgatccaccgtctagccccggcactggctgccaattgtcggtcataaaaaagaagggtagcaattaacagtaacaaggaaagaccgtaaacataaggggtggccttccacagtttctcagagtccaccaagagcaataaaccagctgcgactgccccaatcaccagccagcccaactgccttagggtaacagtcaaatcttccccttgaatatgaacggtcgtcgcataaagggtaacaatcccgataatacagaggattaaaacggggaaaataatactatagtcaatccgttgtgggctaggcgaatttttcattgcgagaatctcctatcttttaacttaaaaacgagccaccgatactgaatgaaaccattctaacatagtttaacctactttagagggtacaaaaaggacaaaagaaaaatttttaaattttcttacagcttgcttcacccactagccaaaagtagccaagcctctattaaacattcaaaatacacaaaagtctttccatcctccaagactcaaaaaggattaactgaaggctatttccagttaatcctttgaactattttaaagtaacgaactcccctgggccttccccacaatattattccttgtgggctaagacctcactgactgtgacaaactcatatccctggtcagctaggtagtcaatcgacagacggaagccttcgatggtggtctggtgaatatcgtgcataaggataatggacccgtcagacgtttgctcctgaaccttgtgcaagatagcctgggggtctttggactgccagtctaaggtatccacatcccataagatggcaggcttttgggccaggtcatccaccctgctattgtgggctccgtaaggtgggcggtagtactgagggatttgcccagtcgctgtttcaatggcccggtcaccttctgaaatttcagattggacctggccactgccaagggtggtcaagtcagggtggctaaaagaatggttgccaatttcgtgaccagctgccgccacccgcttagcgacatcggggtaaaagtccacgctattccccagcataaagaaagtccctttggcatcatactggtctaaaatggtcaagatttggtcagtatactctggatggggaccgtcgtcaaaggtaaaggccaccagctttttaccctcttcttcctggtctaaagtctcctcttcctcgtcttgatctgctgctccctcctgggctaaagctttcgaatccttgtctccttccatgtctaaatcaggaaacgtttggtctaggagggagtggccttggttatttaaaaaggtcttaacttggcccaggcctaagctaactttcggggcccctgctgctccggctgcaatctcatattgggaaaattgaacgacaatggaatggtcagtgaaataaacggcctggtaaagagatccatctgctcttttttcctcaaaatactcttcaaaaaagtactggcccaagtccgcttccaatttccttttgaccaggtcttcaaattgcttccgcccctggtcagtgaaatagtcctctgcctttagccaggttcccgctttggtatccaccatcaaagcttgggtactggtttctgggtttgtcttattagaccggataaaagtgtcaaaaacgagactatagacactctcaatgactggatggagggtaaaagatatattatggtaaagcttgtcatcctcggtcaggccttggtcttctaggtttaagttgtcaactaaggcctggtagccatcctttttatcttggataaagtcttcaatatcctggttcaattggtcttctttaaaaaccgggtagctgatgaattggttgtcgtagtccccatgaatttcttccttgctgatccctattcccggataccgggattcttctactaaggcccggttttgggtgacactggcctccttgggctggaaggatttttgggagggcttttgggaacaggccagtaaaatgagggccacaaaggcaaggacaagggtcaagacagttgattttttcatcaggaactccattctaaggccatgcaaaacagtaatcattcaattttattataagttggctacttaacttggtcaagcagatatttaattacctttaaggcaagcaagcaagctagtcctgcaagtccttgaaggtggcaatggtttggttgtataccctatccttatcttggtaatagtaggcaaagagcaagtccaacataatcaagactggaaattggggtgaaatcagccgtccttcatctaggtgctttttgacagccaccaagaggacttcatcgtaaaagccccgaaaagtccggtcattgtttgaggtaatcaagaccgtcttagctccccttcccttagcaacttgcaaggcctccatgacttctttggtcttggctgaaatggaaattcccactaaaagatggctagggttcatggaagcggcctggattttcatcgtatggtggttggactcagacaggactgggcagccaaaccgcataaagcggaatttaaattcatcggcacaagcagcggaattacctaaaccataagcataaattaggtcagcagctttaatatacttgcaaatccgcttaatctgggccacatccaccatagaaaaggacttggccaagatatcctggtagctgtctaccactaggtgggttaagtcagtatttttctggtccaggtcctggcggttgatggcggccttgtagtggtagatgaactcccggtagcccgaataaccacacttttgggcaaagcgggacaagctagactcagaaacctggacttggtcagccacctggcgggatgacaggcaatcatggcctggttgctttaaaaaatacttggccagctttttttcatttggggtaaaactttcatacaggccttcaatggttgagaccaggtttagttcgtacttgtcaggcttaaacatattactacccccttaacccagctgatccaggccggtgaaaaaggcccccaggatgccggcatcatttaagtacttagccggcttgaccgcaagtggccgatcgactttttgccctagaccttcctggattcgggggataagatagtcggcctgggccatgatcccaccccccaggatgaccatgtccgggtccaggctcagacacaagacttgcagaccgtctgtcaaatagtccactagccggtcgatctcttccaaacagaccctattgccctccttcaagggctaggtcaaaaatggtcttaccctccaaaccttcttgccctaatcgagcttcacagcgtttgattagacctgtcaccgaagccaagtcttcaaaactcccatcttttaaggggaggtagcccacttccatggctgccgagtgggccccgcggaagacttggccttggtaaattaagccacccccaaccccagtaccaagggtcaaggttagagcgacttcagcagacttggcatgaccctgtttatattcagccaggctggcacaattgacatcattgtcgacaaaaacaggcttgccagtcaagccttgtaattcttctttcagcttcaccccagcatagtttggaatattttcattggctgattggatgacccctgcttggacatccaccacccctgctgacgagatgccgataaagtcaatactgtcatccaaatagtcttggaccaggtcaaatacaaagctgggcactttgggaccccccagactcttggggtcccaattttggctgccctttgcctggatttcaacttgagtctctggtccatcttggcttaaaatgccatacttgatggcggtcccaccgatatctacacagattgccttcatgttttcctccttaaagaaaccgcattagccgccttccaacagctaatacggtctccatacttttgcttatttagtttttgttaaagtctaggatagaagagtagtcttcacgtttagaatccttgcttgagatagctgagtaaatgacagagcccaagtaaccagcaacaaaggctacgatgatcgaaactagggagttagcccaaatactgatattgatttcttcagggataataaattcgatgataatcatcaccacagccgaaacaaggaagccgatgtaggcgcctactgcattaccgcgtttggtaaagataccgagggcaaagaccccacctaagacaccgaggactagaccaacgaagccgttaaaccattcataggcagagacaatattcgattggaccataatcatggagaccactatagcaaagaggccgaccacaatagtaacgccacgagcaattttggttttgcgtttgtaatcatatttgcccttggtgtcaaagacttccacaatatccaaggctaccgaagttgccactgagttcaagcctgttgacaaggtagactgggaagctgcaaagatggctgccaacaagaccccagttaccccaattggcaattggtaggcgataaagtagccgtaagccaagtcttggtccatgccactggcaattcctgcttggccgtagaagataaacaagccggttccaatcaaaaagaggatagtagcaataaagagggaaagaaccccattggttagcatcattttagtcaggtctttagtattagtggtggtggtaaaacgttggacaatatcttgactggatatgtattgggtcaaggtattcatcccagctccgacgaagacgaggaagacagtatcttcaaagatagtcggggagaaccattgttcatctggtgcaataaatttcccatcgaccaaggtttcggcaatggtgcccacaccgccgtcaatcccgttaatcaagatgattaaagagagggtgaccccaaccaagacgataatcccttggacaaagtcagagaagaggactgacttaagcccgccggtgtaagagtagaagatggcaatggcacccatggcaatgatcaaaatgttgacattcaaaccggttaattccgccaaggtgatagaaggtaggtagataatgatggacatccgaccgatttggtagatgataaagataatagccgaaaccacccggaggcctctattgtcaaaccgtcgctccaagtagtcataggccgtgtcaatatccaacttggcaaagaccgggaggaagaaggctatggcaattgggatggcaataatcatccctaattgggcgaaccacaagatccatgttcccccgaaggagttacccggtaaagacaggaaggaaatcggactgagcaaggttgcaaagatggaaacggaggttacataccagggtaccgtcccatcgcctttgaagaattccttcccaatcatttctttcttagcgaagtaattaccgaaaaataggacgaagattaggtagacaattaaaattaccaaatcgatccaagtaaagccttgtcctgacatggccaaaacccctttctattagcttaaatattggtcataaatggccttagcttgagcgatctggctgtcacttgcactcgccattggacgtctattgtagccagcgtcaacccccatcagttttaagatttccttgatggttgggtagagaccattatctaaaatagcttcaattaaatcattggtttggtgttgaacttctagggcttggtcgattttattttgccgggccaggtcaaaaatttcccgagccttgaccccgttaacattgtaggttgacccaatagcgccgtccaccccgttgaccactgctggcaggagcatttcgtcaaagccggagaggatcaactcatctgggcaagccttgcggagtctctccaacaagaagaagtcggctgcggtgaatttcacgcccacaatattatcaatttcaaagagggttttaaagttttctaccgatatctctaccccagtcaagtcaggaatagagtaaatcaagagccggttgtcaacggcttgggcaatcatcttgtagtagtctctgatttcgtcaaagttatacttgtagtaaaagggggtgaccgctgaaatggcgtcatagcctaggtcagtcacaaagtgggccaaatcaattgcttcataaacattagtcccaccaatttggccaatcaaggtcacttcactgcccgcttcgtctttgaccacttcgaaaactcttttcttcatgtcagtgtctaagagaaagttttccccagtagacccaccaacataaaggccgtccaccttcatccggtcgatattgtggcggacaatttgccgcgttccctcttcgtttaaactgccatctttgttaactgaaatcattaaagctgtgtgcaagccttttaagtcgtcgtgcatggtctcttcctttctattttattctttaattttgtcgacaaaacgttgggtaaggacttggggccgggtaatgctagacccaaccaccacggtgtgaactcctaagtctaggacccgtttggctttttcgggactatcaatattgccttctgccactactggggtcgaaaccgccttgagtatacggcggatcagttcaaagtcccccgcctcaatcttagtccccgaactctggtcggtgtagccgaccagggtggtcccaatatagtcaaaaccaagctggtcggcctggagggcttcatcataagtcgaacaatcggccatcaaaagttggtcagggtacttgtctttgacctccttcaaaaagtcctccagggtctgaccccccggccgcttgctggcggttgcatccagggcaatgacatcaggtttgacagacattaagtcatccacttccttgatggtaggggtgataaaggcatctgcatccggataatcacttttgacaattccgataattggcaggtcaacttgagctttaatttctttgatgtcctggctggaattagcccggattccaactgctccgccttgcttggccgctaaagccatccgtcccatgataaaggacgagtggaggggctcttcaggcaaggcctggcaagaaacaatcaagcccccttttacctgatggtcgaattggtctttggtcgtcatcaaattcctccttgtatatgaaagcccttttttcattttcaagcttatcagattctgaaagtataatcaataactctaagcaaaatgttagtactttcaaaaataaaacaaatgccagttattgttaaaagatcatgcaagctttcccttttctttgcttgccgagactggtgacttgcccccaagtgctcctcctttatttgcttgaacttgttggagtgttcgggcaaaagaaaaagcccgggagttccccaggctttaggcttccagtagaccttatttcaattctactttaccgccagcttcttcgattttttctttcaattcttcagcttcgtctttttcgatgttttctttaatagcagctggtgcgccgtctactaaagctttggcatctttaagacctaaaccagttgcttcacgaactgctttaataactttgattttagcagcaccggcgtcaaccaattcaacagtaaattcagtttgctcttcagcatcgccaccagcttcgccacctgcagcagcaactggagcagcagcttcaacgccgaattcttcttcgatagctgatacaaggtcatttaattcaatgacagttgagtctttcaagtcttcaatgattttatcaatatctaaggccatatcttattcctccattttccttaagattattagctttaagagagagcctggtttggatcaaaactaggcagcgtcttcctcttctttcttctcggcaagagctttgaccacaagtgcagtattgcggactggcgcttgtaggacggatagtagcatagaaagtagaccttcccggcttggcaatttagcaattttgccaattgtttcaagcgttgcaattttaccttcaatcacgccacctttaagctcaatggcttcatggtcatcagcaaattctgagataattttagctggtgccacaacttcttcctcgctaaaggcaatggcagttgggcctttgaagatatcttccaagtcttcaaaaccagcatcgctagctgaccggcggagcaaggtgttttttactacttgcatgtcgacaccagattcacgcaattgtttacgcaattcagtgacttccgcaacagtcaaaccccggtagtcaaagataatggttgaaacagacgattcaaacttgtctttcaactcatccacccgggcttgcttctgagcgataacctcttcttttggcattcatctacacctcctgtgaaattttgaagttttcaataaaaaaacctcaatgtcaccgcagacatagagggagtgtgtatattctggtatacaaatcaatcctcggtatgaaattaagggttgccccacatactgtcttcggcttcatatttaatattatcttgacctggtcaagtatagcaagacttacctaccaggtcaagactctttttttacttacttaataatggtacttgggtctagtttgacacctggaccaaatgtactagcaatggttacatttttcaggtaagccaatcgagaaatagcagctggtctgtttttcaaaataatgtcgtggatggctgctaggttgtcttggagctcatctggggtaaaggaaactttaccgattgtcacgtggacattagactgacggtctaagcggtaggtgacctgtccagccttgatatctttaacagctttggcaacatctggggtaacagttccagtcttagggtttggcatcaagcctttgggtcctaagatccggcccaatttcccaacttctgccatcatatcaggagcagctacgacaatatcaaagtctagccagcctgcttgaacccgttcaaccaaaccagtgtcgccgacatagtcagcacctgcatcttcagccgctttagcagcgtcacctttggcaaagacaagaacggtttgggttttaccggacccgtgtggcaaaacggttgccccacgcaattgctggtcagcttgtttagggtcgacccctagtttgtaggcaacttccacactagcgtcaaagtttgcatagtcaatttcttttacaagttcaattccctcagctgcgtcgtaaaatttatcacggtcaactttttctaatgcagctaggtattttttacttcctttagccattaaataattcctccttttgtggtaataacggtttgacctcccactgattcctggctaagttaagccaagttaagtagggacctatctttcagtaggcttatttatctactgtgatccccatactgcgggcagtcccttcgaccatccgcatggcagcttcaacgtcagctgcgtttaagtcttgcattttggtttcagcgatctcgcgaacttggtcgctggttacattggcaaccttgtttttattcggttctcctgaagcagactcaattccagcagcttttttaagcaaaacagcagccggtggagtcttggtaatgaatgtaaaggaacggtcttcgtaaactgtaatcacgactgggataatcataccagcttgttcagctgttcgagcattaaattctttagtgaaacccatgatgttaatccctgcttgacctaaagctggcccaactggtggagcaggacttgctttaccggcaggaatctgcaatttcactacatcaacaacttttttagccacgtgacatacctccttgttttgtccgtgagtggttaaaatgaggatcgtgtttttcctctcccactttttattccagcaccccaaatatccctatttagagcactcaagcattatacacaaatatcacttgacaatcaagtgcctaatccattttggcaatttggtggtagtccaactcagtggtggtttcccggccaaacatctggacagaggctttgaccttgcctttttccggatccacttcggtgatggtcccttccataccagcaaaggcaccggaaataatctggatattttcgccaatttccacttcaatgtcaaccttacgggggttcatgcccatgctgcggagcaagttgtccacttcttctgggtaaagaggggacggcttactgccggccccgtgtgaccccacaaagccggtcacattgggggtgttccggaccacataccaggcctcatcagacataaccatctccactaagacataaccggggaaggttttttcggtctttctttccactccctcttctgtgttttcgtaaacttcttgctccggtaccaggacctgtaagatattatcttccattcccatggattcagtccgggattctaagttctgcttgaccttgttctcataacccgaataggtgtgcaagacataccaagctttttgactttccaactcttcagccattttattccctccgtatcgtttttttaacagttttataaaaaaggctaaataaaaaaccttgcctatccagcaaagtttccaaccagttttggggctcacccactgatttcaccaaccatcataccacaggcttcaggaaaaaaccagacgatttacctgaccctggccaaatcgagtaggagactagccattaattggctagtcgacctctcacaccaccgtgcgtacggttccgtacacggcggttcaatatcttgcgtaagcagactcagcgatagtgcttagtggaactaagccccacttgctgagtctttctgttgttattgcacgatgaaattcatgtgtgcatgacagtcgccagtactttttgcgtgaatacgcaatccgtttggctgaatctaagtccagtccatattgttccaactttggtataatagttcgtggacgtttccaccgtttaagaatcagctgtctgatacggtgatttaaccattgctcaacttctttgataaagcttttaatgaagcctaaaccaaagtaattaatccaaccgcgggtgactcgattaatttcagtcattatctttttaaaagtacctggccgtttacgactggtcagctttctcaatctgcgtttgaatttctgcttggcttctttggtggggataaaacgataatccccattcacttgcttcatcagacagctcaaaaactttaaacgggtaggagacccaacctggcttttgtcttgattgacgattaactttaagtctttttcaataaagcgtgtgatgctgttcattacccgttcaccggctcgttttgatttaacgtagatgacaaagtcatctgcgtatcggacaaatcgatgaccacggttaaccaactctttatccagttcatgtaagtacacattactcaaaagcggtgatagaacaccaccttgtggtgcccctgtttcacttgcgataaattcgctagtcaaatcaattacacccgctctcaaaaacttacggataattttcagtatcattttatcttggatgtactgttcaagataatagataagtttgtcgtgattgagcgtgtcaaagcattgtttgaggtcacaatcaactacaacacgatagccttctttataatactgtgcacattgcttgagagcactgtgcgtgctttttcctggtcggaatccgtgactgttgtcatagaagtgcgggtctataatcggttcaattacttgccgtatggcttgttgaacaactctatcccgcacacaaggtatacctaactttcgtttttctccattcggctttggtatttctactcgtttaactggttgaggcttatacgttccatcaagtaatttcttccgtaagggttgataatacgcttgaatgtgctcctctatctcaaaaacggtcataccgtcaatacctgcagcgcctttgttccgtttaacggctttggctgctgtttccaagtttcttctgtcaacaacttgctccattaagtttggagacttacgatacatttctgtcatttcacctaaagtttactagacgcatcggcttaccctttcggttccacctattctctccaccgattgccaatctcttcgattgttttctgtcctattcgtaaactttaacctccgttctatactttgtatgaatattgttcagtccttcgctacaacgtagctactatgacctcggctgacttctcactattcgttgttactactaaacgctagtgagacctccccgagtaaggtgtgacaaccttccactcatgtcactgcttcatttactgaaagggacttgtgcagtattggactttactttgttatgcaagctcatccatcccaaatcagccttgatatgaagtttctgttcgtcagtgcgagtgtttgcctccagcttccttcagattccacctcacgatggacacccttgccttcagctaacagttcctactgccaggcctgcagtggactttcaccaccaagttgtcacccatgccgggcgcacataaaatccaggaggggcggcgctgggcctaccctcctggttgtggtcgtttttattcgtcttcactggaccagccttggtcattcaagtagtcttctaaatccgatgccaccccggtaaccttggttccgtagatgacttggacagaattgccactaacaacaacaccggctgcgcccgttttttgcaagaggcttttttggaccttggacccatctgccacagttacccggagtctggtagcacagttggtaaagtcactaatgttgtcttgaccacccaagccctgggtgatttgggctgattgctggtcttcttcacgaccaggcgctttgctgtcttcttcttccaagctaaccttgtcgattcctttgctttctcggtattcatccttggtgtggaggcggcttgcttcatcgtctgcttcccggcctggtgtcttcaggtcgaatttttcaatactgaagcggaagaggatgtagtaaaggaccccccagaccactgtaaagatggctagggcaatccagttggtccggccattgcccggcaagactccgtagaggacaaagtcgataaaaccagctgagaaggtgtaaccaaccccgatgtttaaaagctggacgataatggttgacaagccggccaagaccgcattgaccccaaagtacaagaagggagaagcgaacaagatggagaactcaatcggctcggtaatcccggtcaagaaggaagtgatagaagaagaaaggaggagacccttaacatcttctttccggtccttgcgggcagtgtggtacatagccaaggctgctgcagggaaaccagctagcatcatcgggaaggcaaaggagaagtaagaagctgctgctggtgaaatggcttccccggcttggagttgggcaaagacaatgttttgagccccttgaacagtttcaccagctactgtggctgtcccacccagggcagtttgccaaaatggcaggtaaaaaacgtggtggagaccaaagggaatcaaggctctgtagacatagccatagaagaaggtcccgatgaccccagctgaagcaatggcctggccgacccaggcaataccagccccaacataaggccaaacaaaggctaaaagaatccctaaaagagtccctgccaaagtggacacaatcggaataaagtgggtcccggcaaagaaggagagggcatcagggaacttaaccttgtagtatttattatgtaggtaggtgactaaaagtcctataatgatcccaccaaaaaccccagtattcaaggtttcttcaaaacctaagacagaatccaccaagccttcaatctcccgcaagcgttcaatattgccaaagacttggatggtactggtcatactggcatacatcacaaagtagccaactgccccagacaaggcggccacttcctttttggccttggccaaacccataggcactgagatggcaaacaaaagggccaggttggagaagatcacgtccccaacatccgttaaaatggtcaaaatcccatttaaaagagtcccttcacccaggactgcttccaaaccccactgttcgacaaaggcttggccggtaatagaggccccaatccctaagaagagaccggcaataggcaagagggcaatgggtagcataaaggtcttgcccaatttttgcatcaggttaaaaaatttcccgttcattctttaattctcctttttaatctagtgacttatcttgagccaggctttctggcccaaacaaaaaggacagccccttggccaggagctgctttaacttggtattaaaagttgcttcttataatagtgtggttaaaatccagtctgacaggtagaagaaagctgagaaaaagatcaaaacgctaaaaattgtcgccgaatctttccgcaattccttaccacttggccaatccgttttttgcatttcttctttgacttccctaaaaaaagtggttaccttcttcacttcacccctccgttctttttaaactccattgtcacttaacgtgtttccttgtgggtggtgtgcttgccacaatacttacaaaactttttcacttccaagcggtctgtccggctcttagaccccgccggcttggtataattgcgcgacccacagatggtgcaggctagtcctattttcttttgagccaagtcagccacctccccttgcatgtatctgcaaaatgactttatcatgaccgggccttgctgtcaatgattttcagaatagcttgccctgtcctgtctctagttagctgactggaaaggtctaccttcatggtggggtaggcatggagggtgctagcttaggcctagactaggtccttgaccatgagacaaggtctaggccggcctaagatagttgaggcaaaaaatgaatctttaatctaaggagtctcccttgaagtcaaaggattcatccaagagttcaaactcagatgcatccccttccgacacataaatctcctggtcgtgggtgataaagacggctgttacatcttctaagctggaagcataatccatgccctggtccaagcccatagaaaacaagacagtggctagggcatcggcatccatggtggtttcagccgccacactcaaaccagctagctcattgtcaaaggggtaacctgtctctgggtctaagatgtggtggtattcctggccgtcctcgccggtaatcaaacgctcataaatacctgaggtaaccacagcttcatccatgaccggcagcaagccaacaatctcccctctttcatcaaaggggttttggatgccaatccgccagttatcctgggatccgcggctagatgaccccaagaggaagatgtccccgcctaggtcgacaatagccgtggtgaccccctcctcaactaaaacatccttggcctggtcagtaatgtaacccttggcgatagcccccaagtctaacttcatcccttcttgggtcaagtagactgtcttggcttcctcgtcaagctctacattctcataattaaccaagggcaaagcctggtcgatctcttcctggctagggacctgggcatcctcctggccaatcccccaaatatcggtcaaggccccaatggtagggtccatccgcccaccagagatttcagcatagtccaaggcattttcaatcacataataaacctcatccgaaacttggaccggttcctgaccagaggattcattgatggcataaacctccgaatccgggttggtcatggaaaaaatgccatccaattcttccacccggtcaaccgccttgtctaaggcttcttcctggccttggtcataaaccgagatatccaccagggtccccagtagaaattcttggcgttcatagggttggtctgctaggtctctcggatcatcttctcccgcctgggaacaagcagttaagaccaacaagaaagatattaagaggactaggatttttttgtccttcagcacttgacatactcctcacattttaaatcgctaccattttaccgaaaagttaaggccctgtccatgcaatcggatcaatttagctgggtgaggctcaaaaatgcctacccctgctagccatggatacttagtcctaagactcttttctattatacccggaatcatgaggatttttacaggatagcttagaagttggtgaagcaagttattctcggtcttcttgatgatttgccctgacacccggccaagtataacttgtcaaatcttaatttcttctagaagtctaagcccagatgtggcaaaataaactaatataaaggatggttatgatgacccggacgcaaaaaatgatctacattgcccttttatcggcccaggctgtcgttttaggcctggtagaaaatgcgattcccttcccctttgccctggccccaggtgccaagctgggaattgccaacctcattaccctgattgctatctacaccctgcccatcaaagatagtttcaaggtggtcatgatccgcttagtcatgaccagcctcttaggcgggaccctgtcaacttttatgtatagctttatgggggccatgttttcctacctgggcatgctcctggtcaaatttttaggccaaagcaaggtcagtgtcatcggggtcagcgccaccgggggcatcctccataatgtcggccaactctttatggccagcatcattgcccaaacctggaccgtcctcctctacctccctgtcctttcctttgtcggcatcttagcgggtgttgccatcggaatcgccggcaactacctccttgaatatgtcaacgtcatgcggaagttccgccaagattatgaaaatgagaatagaagacggttgggttagtaaaaaccagctagccagcctactaagccaaacagccaagagtgacgtgcacccttggctgtttttcactgattggctttttataagtccgactttgattcactactataaaccagcgtagtggtcaaaccaggacttgatttcttccaggcgttcaatccgcaaattcggaaggccttgccgggacagaccgtggctagagtcaggatacaagaccagtttggtgtcgactccagcttttttcatggcgatatacatctgttcaccttgctcttgagggcaacgcaagtcttcctgaccgtggaggactaaaagcggagtggtggactggctggcataagcgagcggagacatccgccacaagtcttctggccggctaaggtcagcttgcagttgaaactcgacaaagaaggctcccacatcactggtcccgtagaaactgatccagttggaaatcgaccgctgggtaacagctgctttgaagcggtgggtgtggccgacaacccagttggtcataaagccaccgtaactgcccccagccacaaataagcggtcagggtcaatatttggatactggtctaggacataatccacccctagcatgatatcttcataatccttgttaccgtaatcacccaagatggtagccacaaattcttgaccgtaactgttccctccatgagggttgagcataaccactccatatcctgccccagccaagtattgaacttcgtggaagaagctttccccatagttgacttgaggtccaccgtggatataaaccacagcagggtggttgtcgcttgactctagcggcttgacataccagccctggacttggtcattatccgcccctgtgtagtagaagctgtcgatgtctgcaaaagtgtggtccgcgtcaaaggcttggttgggattgtacaagtctgtgatttcccggctgttaaggtcgaccaaggcgagccggctgggtcggtttaaagtcgaataggtcacgactaattggttcgctttgactaggtcaccgccagtgaggtggattttttcatccaaaactatttcgttttgtccttggacattcccctggtagaggactgttttcccatggtcggtgactggataaatgaagtcttggtctgacacccatttaactggaaagccggtaatcttttgctggaagtcgcccacaatggtgtcacctaccatcttgtcttcaactgacacattagttacttcttggctttcccggtcccacaggtaaaggttttccaggctgacaaaggcatggctaaagtcattcccggataagaggaaggccgtttcgtcactgttgacagcctcaaagtaaaagctaccctttggatagtcgcccgttaccaagcgggcctttttttgggcgatattgtactcgtatacactggccccgtagacccactcatcatccgggtctagccggtccacataaaggagatagctttcatcttgagccacatattggaggttaaaagcctggtctttttccaaaacggtgctgacttcttgactagccacagctacctgcttcacttggtaggtcaagtcttccggcaagaggcccaccccgtctgccttgtgttgcaggcggttaatcttagttggctggggccatgttgaacctgccttttgatcctcctcttccttatggctggtttggtagtagagggaggcggaattggcagtccagaggtagctagtgacaccctgtttttcatccgttaaggcaaaagcacccccacctgtaagtggaatgaggtatagctgggccttttcccctttaaagctagagaggaaggacaggtacttctgattaggcgaaacttcaatggcagtgggattgtagtcctcacttagccagagggtccggtcctgattcttcaaatccaatcgccacaaggaagtcttgtagctattgctttccttatcaatccttgtctccaggtaaaaaactgcctcatccacggcaaggggctgggacacattttttaattcatataaactttggctcgttattttactcacacaatcggctcccttagtaattaaaatattatcaatattttctcactttattgacctgacgtcaattgagattgtctgaatttcaatctatatccggtttttagcttggttaaaaaataagaattctaggcgttaaccattaaggtaagcttaactaggcttgtcgaaatagaggtcaaattgtcaaaaaaataagcccaactccaaaatcaagactcagcttttttcatgggcctagctggtcaattttttctagcataattggctcgcaaaaatttccagatttaaaatacttactttttgacagctaatcatatttttgctaccttttaactaagcaagagagaaatgatgaggataagaaaagtacaagtaagtaaactgactagcgagtccggttggtgcaagcggaccagtccttgcttggaagtgcatctttgaatcgtatcagtgaaactggacccaaagttatggttcacttgagctggagccggcctagcccgttagcgctaactgctagccctttgtgtgctactaagatgagtgatgcagttggccagtccaactgcttggataaggtggaaccgtaaagataactttgcccttatgtactggaaccagtgcgtaggggcttttttacaaacaaaataggaaggattgataaaaatgaaaaaacttttccctaaaaaaacctctctcttagcttttcttgctgcccttgccctggtcttacttgcttgtgggtcagaagaagaccaagaaagcgcagaaatggaccaatgggaaggccccgtccgggtagctactgtcggtaccggccacccctacagcttggttgaagaagatgggacctggaccgggacagaagctgagatctgggaagagattgaagagagaaccggctgggatgtccaagtccaacgagtcgggtctagtgctacctttggtcaattagatacggaccgaagcgatgtcgctgccaacaattatggcttgaccgaagagcgggccgaaaaatatatctacaccgtcccagcctatgccgacgctaataccatcggggttaagtctgacaatgaagacatccaaagcctagaggacctgtcaggtaagactgtcggagtccaagctggtcaagcagctgatattcccttgacggaaatggctgaagaaatggactttgaagtcgttcgttacgactccaccactgatgccttcttgcagctggaaattgacagtgttgatgctgtgggagccccaagatccttgctgaacgaatacattgaaacgagagatgccgacttccgaatcctagaagaaaacctaacggccgcacccgtcgtttacttcttacccgacacccctgaacatgcccagctcagagatgaattaaatgtggtcatcgaagacatggtggaagacggcacaatgggtgaaattacggaaaaatggctcttttctgatatgaccaaaaacttagaagatatcgatttagatgaatacgactttgactaaactgatttggagggaataaccaatatgggatttgatttttcctacttgcttgaagtcctgccccagctcttttactctgcccgctttactctgtatttaacccttgtggccaccttatttggcttgatcattggccttattctagccgtgatcaactattatgaaattaaaatcctcgaccccctagccaaggtctacctcttcgtcatccggagtgctcctttgattgccctcttgtacttcttttactatgggattgccatgtacagtgactttgtacagaatatgaaccccctcaacgctgtctccatcgttatcagcatgacagcaggtggttttatggctgaaagcatccggggagccctcttatcggttgaagaagggcaaaaggacgccgcctactccttggggatgaccgacagccagctcatgcgccggatcattattcctcaagcaacccggatagccctccccagcctctttaacaatgtaatcagcattaccaaaatgacctctctttcctttgtcttaggggtcgttgatgtcatgggggctgcccgggttgaagggtcacggacctttgcttactttgaaatctatgcaggcgtaatcattgtctacctggtcattgttggcctcctcagccttttccaacgctatatcgctaaaaaatcatcccaggcttattaagctagtttcgtgaaaggagttgttttttatgacggaaaatgtagtgacgatcgagaatctgtctaaaagttttggcgaccataccgtcctcaaagacatcaacttagaagtcaaagacaaggaaatcgtcgccattattggcccctctggaaccggtaagtcaactttcctgcgaaccttaaattatttaaatgaacccactagcggaaaaattaccatcggagacgttacagtggatgctaagtctcactctaagaaagacgtgcaaagactccgcctgcaatcctccatggtctttcaacactacaacttgttcaaaaacatgactgccttagagaatgttatggaatccctaatcaccgtccggaagctagacaaagaccaggccaagtccatcgcaatagaacaattggaaaaagtcggcatggccaagcgccaagatgcctacccttcagagctatcaggaggccagcaacaaagggtggggattgcccggtctttagccgtcaaccccaaggtcttcctctttgacgaacccacgtcagctctagaccccatgttggtgtcagaggttttagccactatccaaggcttggtggaagaaggcaataccaccatgctcctggttacccatgaaatctcctttgctagaaaagtagccaaccgagtcctctttatgaaccaaggacggatagcagccgatggaagtccagaagaaatcttggataaccccaccgatactgaccttcgcaaatttttagacactagttattactaaggtaaatttaagaaggtagtttttctcagaccatggcccttgttcgagaaaaatggagggaaattctcgaataacagatgttgtttgagaaaaacaagaagaaattctcgaataacagaagttgtttgagaaaaatagacataaattctccaataacatggtttattcgagaattcctatcttcaaaactcctaccattactaagcaaacaagccatccctagctaaagggctggcttgtttcaccttctattcaacattttgaataatcttatccatgctccgggccacgcctccctggtagctagacccaaattttatcaagtgaagcaagagcaggtataagttataaaattcaatccggttccaggcacctggttctaaggggtaggcctcttcataggcctggtaaaagtctgggccaaagcccccgaaggtcagggtagctcccaagtcaaattcccggtccccgtaaaaaggggctgggtcaaagatagcgggagacccatcttttaagtacatcacattgcccgaccataagtctccatgcaaaagagagggtctcgaatcatggtccttgaggctggcgaccatgatgtcatacacttggtcagccttggctgcttgcccctgatcccagtagccttggcttttgatccggtcatacatggggtcaatccggcccttgataaagaggtcaagccaggtctctgtccaatggttgtcaaaggcaatatccgccatatcagttgggtagtcaaaaccaaactggcctgaatcagactccacctggtggagcttggcaaccagctggcctaattgagactggctgccagaccctccttcatccaagtaagacaagaggaggtaggcatccccatttaactggccggcatccacaactttgggggcggtgacctggtggtcttcaaaaagctttaagccagcaatttcagctgcataaaaatctgttttggctccgggttggaccaggagaaaatacttgcctgatgacgtttggacttcataagcctcattgatagacccacctgctactggctgtaaagtctgtaagttctcaactggcaatttttccttccattgctttaaattcaacatgtctaccctgctcctagtttgtcttagtcaaaatgcttggccttgatttcgtctaaaagcccctggcagccctttatcacatccgcgtaagtggcatcaaaatcgccggtgtaccaagggtcagcaatatctttctggctaccagcataggcgagtaattttttcacctggccagctggtcgacctgagatataggccaaaatatcgttcacattactctggtccatggctacaatgtaatcagcttctaggtcttcttgatcgatggggcgggagtgtaaaccctccgctgataaaccttcctgggcaagtcggtcctgggtgccttggtgggccggattgccttcttccaagctagaagttccagctgaatccacctggacttggtcggctatgccttctttttctaataagtctttaaaaacaacttcggccatgggagaccggcaaatatttcctaaacaaacaaagactaccttgatcataaagattcctccccgttaatttctttacaagtattataacaatagtctagcaaaatgaacaaagagatcctaaaactgagtccatttttaggaaaagctaaaaacccctcctagccagaaagacacccacacctgcttttaagccaaaagcttagataagctttgacctagccttcatggtaaactaagcaaaccattttaaaaaggaggtccactatgccctggaacttaaaaaattaccccgatcgttttaaaaacctagcccttccggtccgcaaaaaagccatcgagatagctaacagtctcctagatagcgattatccagaaggccaggccattccgattgccatccagcaggccaagaactgggcagaaggagctagtccaaaagagattaaagcggtcaagtacggtagccggcctaaaaaatccgactcccatgaagaagcagctgatccagacctgttagaccaggacgtcctggtctacttcgatgccgacaaaaaccagtggcaggtcaaaacggaaggagctgaccaagccagtgattcctatactagcaagaaggaggcgctgggccgggccaaggaaatcgccagcaataagggaagtcaagttgtctcttataccaagcaaggtaaaaaagaaaattgactggtctaaaaagccaacaatggccattccccagcccaagctaagactttaacttaccacaccaaccagttcttaagtaaaagaggctaggactcaatcaagcagtcctagcctctttttatttataatcgccattgtgccagaggacaatctccccttggtccagggactggggaacatcgataatccgttggttggcactcccccgaaaatggaggtccggggcaaattggtcctgtttgaaccggccatcaaccaaaatgtccaggtaagacaagagttcttttttatcttctgttcccttgtcaacaatttcttcccaggtatagccagaccaggaccagatatccttggcctggccgtattcttgccggacccgcttgaccaaagacagtgtgatcccggtgtttaagaagggctccccacccaggagggtcaagccctggcagtagtcggccgctagatcttctataatttgctcttctaagtctttagtataaggattgccgtaagagaagttctgggcaatcttgttgtaacagcccggacaggcaaaaggacaaccagacacatagaggctgcaccggaccccttctccgtcgacaaagttatagggcttgtagtcagcaatatagcccttggaaaactggtcagaggtccattttgtcgggtcttttgccattaagactcaccctttacgtgtttaacccgggactgaatttccttgtgacggccgtggaccataggacgtttttggggattgcccaggtagccgcaagttcgtttgaccacatcacaggtatctgggttggtattgccacagcccgggcattcaaaaccgcggtcagttggcttaaagtcgccgtcataaccacactcataacagtggtcaatgggggtgttggtccccaaatagcccaccttgtcataggcatagtcccagacagcttctagggctttggggttggtttggagtttaggatactcacagtagtggataaacccaccacttgaatatttaggatagtctttttcaaagtcgatcttttcaaaaggagttgggtctttgcgaacatcatagtggaaactgttggtgtagtattccttgtcagtaatattttccacaagaccaaacttgtcccgatccaaacgattaaaacggtctgtcaagctttcactaggggtggcatagagactgaagtggaggtcttcttggtcggaccattctccagttttttccttaagatagcggacaatgtctagggtaaaggccttggcctcgggattgtcctcccactggccaccgtaaaagacagtagccacttcataaagaccaatatagcctaaggaaacagtggcccggcgattcttgaagtaggacttgatgtccccgcctggcttggtccgcttgccaaaggccccgtgaatgtagaggattggagcattctctggcttggtgtccataacccggttggccttaaagaccaaggcatcgtgggcaatgtctagtcggtcgtctaaaatctctttaaagcgattaaagtccccgcctgattccatggcgatccggggcaggttaagggtaacgacccccaagttcatccgaccggcattaacttcttgacccttttcatcccgccagccttggagaaaggaccggcaacccattggagctttgaagctaccggttaattcgataattttatcatagtttatgatgtccgggtacatgcgcttggttgagcattccaaggccagttccttcacgtcatagttagggtcatctggtttgcggttgagcccttccttaatagtaaaaatcaatttagggaaaatagcagtccgctcttccctgcccaagcccttaatccggacctggaggatggccttttggatttcccgctcaaaccaagactgacccaggccaaagcctactgtggtaaaaggggtttgtccttgggaggtgtagagggtgttgatctcatattccaggctttgcatggcatcgtaaatatcttttttggttctttccttggcaaaggcctcctgcttgtcagagtcctcaatccatttttgggccacagccaagtgtttttggtagtttttctcagcgtaaggggctaaaacttggtctgcccggtcgaaggtacaacccccatactggctagaagccacattggcgatgatttgagctgtttgagcagtggcagtctggatagatttaggtgtttctacttcggcattgccgatgtaaaagccttcttcaaacatagacttgaagtcaatcaagcagcagttgctcatagaagagtagggcgagtagtccaggtcatggtagtggatctctcccttttcatgggcattggccacatgatccggcagcatcttcaagcctgtggccttggccacaatgccagctgtcaaatcacgttgggtgttgaagacattgctatccttgttggcgttttcatggacgacatcctggtcccggtccaagagggtgttaatcctttggttgatatccctttgtttcttaaaatggtctaccttcttgcgccggatagactggaaggcctccaagcagtcagtctgctggctgtcttctaggtagtcttccatcagttggtaaagtttagctgcttggatctggtcgcctggtaagtctttaaaaagttggaggaagtagtcttggaagtcggcagagctgacctggtccccagactcctggctagcctggtaggcctggctgtaggagtggtaaaatttgtcaaagtcaaaggcttgctggcgaccatcccgcttgtttacataggtcggttggactaaaacatttaactgcaattgttgggtccgtaccatcagtcaacatcctttctttctagtgatttctttcacatacgctggtaaaaacaagccctggcttccaccctcgctaaggtgcaagccaagtctttatttttaagtcgttaatgaccagcaagacccttataaccactgggtatagtcgtcatcactcatggcctccaccatacccaagcggtagccgttaccgacttgggagaagaagtcatggttggaagttcccgttgagatcccgttcatcacgagggggtccacgtcttctgctgtatcagggaagaaggggtcaaagcccaggttttgcaaggccttgttggcgttgtaccgcataaaggtccccaccttgtcggtccagcccagctggtcatagatcgtgctggcatattccatctcgttttcataaaggtcgtaaagaagctggtaggcccagttcttcaagtcctcctggtccgcttcatctagttcattgtagcctagttggaacttgtagccgatataggtgccgtggaccgactcatctcttaagatcaacttgataatttcagctgtattagtcattttactgttgcccaggtaatataggggagcaaaaaagccggaataaaacaagaaggattccaaaaaaacactggctaccttgattttaagaggatggcgactctggtagatttcattgatcttcaaggccttgttctggaggaggtcattggagtgagcccagtcaaagatggcttcaatctcttccttggtgtttaaggtggagaagatggagctgtagctcttagcatgcatggactccataaattcaatattgttgaagaccgcttcttcgtgctgggtccggacactgtctttcatcacagacataccgtcctgggactggagggtgtccaggagggtcaatccggcaaagaccttggcaatcatatctttttcttctggggaaagctcccgccagtcattcaggtcattggaaaccgggatccgggtatcggtccaaaactgttccaccaacttttcccaggtcaacttgtcaatcaaatcttctaggttgttccagttaatggcttgataaaaatcactcatcctagccctccttcctaaatagtgcaagattcgcaggcatttgcgccgacttcttcttcatcatcggtaaaggttcgaacatagtagatggacttaatccccttgtcaaaggcatagtgccggaggatgtttaagtccctggtggtctgcttgtcggagtggccctgcttccattcatacaagtcctcagacaagacggaccgcaagaagagggtcaagctcatgccttggtccacgtgtttttgggctgcagcataaacatcaatcaccttccgcatgtcggtatcataggctgaagtatagtagtcaatggtttcgttggacaggtaaggggcagggtagtaagtcttaccggtcaatttttcctgccgttcttcgatcaagcgggtgatagggtggatgctggcactggtctcattgacataggaaatggacccagttggggcaactgccaagcggttttggtggtaaagcccgtcttccataacggcttctttcaagtcttgccagtcttgggcggttggcaggtcaatcccccggtctgcaaatatttggcggaccttgtcagagtcaaagtgaaagtcgctagcagtataagagtcaaaataccggccggaagcatagtcagaattttcgaaattagcaaaggtctgaccgcgctccttggcaattttgttggaagccttgaggctgtaataattcaagagcaagaagtaagcatcggtaaactcaatcgactcaggcgacccatagtgcatttggttgagggcaaagaaggtgtggaggcccatagcccctaaaccaatggtgtggtacttgtcgttcccatttttgatcgatgggaccacatcaatatcagatgtgtcagtaatgtgggtcaaagcccgaaccatggtctcgaccgaccgctcaaaatcgtcagtctccatcaggttgacaatgttggtcgaccccaagttacaagaaatgtccgttcctaatttttcatagtcctggttgcccttgatcagggagggctcttgaatttgcagaatttcactgcacaaattgctcatgacaatcttaccatcaatagggttggcccggttggctgtatcaatgttgatgatataagggtagccagattcctgttggagcttggaaatctcagtctctaactcccgggccttgattttggtttttttgatatcagggttggccaccatcttgtcgtattcagccgtgatgtcaacataagagaagggttggccataaatccgctccacatcataggggctgaagaggtagaggtcttcatccttccgagttagttcataaaatttgtctggaacaaccaggccaagtgacagggtcttgacccggactttttcatctgcattctccttcttggtcgatagaaaagacttaatatcggggtggaaaacactgaggtaaacggccccggccccgttacgctgacctagttggttggagtaggagaaggagtcttccaagagcttcatgacaggcaaaacaccagaggaagcattttgaattttcttgatggggtcacccgctgcccgaaggttggacaggttgacaccgaccccgcccccaatccgagacagttgcaaggcagaatttatcccccggccgatggagttcatgtcatcagtcatctggattaagaagcaagagacaaattcaccccgccgcttgcgacccgcattggaaaaggttggggtagctggttggtagcgctggctgatcatctcttgggcaatattttgagccaagtcttggtccccgtctgccaagaagagggcgttaaaagcaacccggtcttcataccgctctaagtagtgagacttgtcgtccgtcttcaaggcatactgggtgtaaaacttgtaagcccccataaaggaccggaagcggaaatctttggcatagacttggtcaaagaggtccttgataaattcaaaagggtatttcttgataaagccttcttcgataaagtcttcattaattaagtagtcaatcttctccctaaggctgtcaaattctagggtcttcgggttgatttcctctctaaaataagcgtctaaggcttccttgtccttatggagagggatttggttattaacaggtcggttaatttcattattgagctgaaagtaagttgtttcagcggtctttaacgtggtcaagtgcttccacctctttctttaaagtctcaacatcataatcactgccttggaattcaaaggcatggatcaaggggaccccatagtcacgagccaggtccttggcagtaaaaataaacaagtcattaaaattccggttgccgccaccagcaactcctttgaagtgggcctggttgtcccctgtttccaaaaaatcgtaccagaagtcggtcacctgggcatcgtaggtgggggtgacgataataaagtcttcatctaggtaaataaaaggatcggccggagacacctccagcaaatccatgtccagcttgttgacaaatttacgggtttgacctgttatgctgaaataaacaactttcatcttaggccaacttgctaagcatgtcgggtctaaagccgttaaaagagcctaggccatctgccaataccactggtagggaagtgtagcccatatcttttacttcacttaaagcttggtcgctagactggacatccttgctttcatagggaatgccccggtcttctaagaattttttggtaaattggcattgcatgcaattgggttttgagtatacaacaatttttttcatcttcatttcctccaggctaaatctcttctttcaagttggaccaattggcagtcagtccaagcaattggccatacttgatgtcgagatgtctttatttacatcctctattttagcgaaaggcttaaaagaaaacaagtgaaaaacacaaaatatggatatataattattatataacactacatcttgggtctgtttaagaaaaaagcccatgataacaatcatgggagtgttttcaataaaagtagaattattgaagttattttatgggatggcaattcttgtatgatttagaaatagttaatccccatggcctctttaacctggtctagggtctggctggcaattttttctgctgcctggctcccatctttgaggatggagtagacataatctaggttagcttccaattcttgccggcggtcccggatgggtttgagctgggcttgaaggacttcattaaggtatcgtttgagcttgacatcccctaaacctccagcccggtagtggtcttttaagtcttgaactttgtccttgtcttgggcaaaaacatccaggtaggtaaaaacgacattgccttcaaccttgcccgggtcttccacatggatgtggtctgggtcagtatacatgctcatgactttcttttggatttcatcttcagaatcagacaggtaaatcccgttccccaaagacttactcatcttgcctgacccgtcaatccctaccaaacgaccctggcctttagggggaaggacaatatcgggttcgaccaaaacatctgtttggtaagtgctattaaagtcgcggacaatttctcgggtttgttcgatcatgggtttttggtcgtcgccaaccggaacatagctggccttgaaggcagcgatatcagcagcctggctaaccggatagatgaaaaagccggctggaatcgagcttttaaaatctttctgctggatttcagacttcactgtcgggttccgcttaagtcttgaagtagtcaccaagttgaggaagtagagggttaattccggcaattgggggatttgggactggataaagagggttgtttgggccgggtcaatccccactgctaaatagtccaaggccacctgcaagatggagtcctggactttcttgggatttcgggcattgtcagtcaaggcctgctggtcagccaccataatgtagaggtcattgtcagcatcagcctgcaaccggacccggttacgcaaggaccctacaaagtggcccaggtggagtttccctgtcggccggtcaccggttaaaatcacattggtcatgtcaagtctccttgctatttaaagtcccctccattatacacaagacgctgtataatataaacttactaattactaaataactaatattaatccactgtaatcttatagctaattgtattttataatactctagcaaaattattcttttatactgtgataataaagtttttgataaatctcactatcattaaatagttcattatgagttccgctgtccctaattctaccgtctttttctaaaacatatattttgttagcatctttaattgtttcaatttcatgagatattataataactatatatttatttgataaataattcagcaaattataaataatttgctttgataaaccgtctaaatttgaagtaggttcatcaaataataaaacatcaggatcatttatcaatgaacgtgctatattaagtctctgcttttgacctgctgataaattatttgctgactcgctcacataactatctaggcctttaggcatcgcactaacaaattcatttgcattcactaattctaatatattatatattttattatcttcaatagacccctcatatccataaaccaaattatctcttatagttccttcaaatagctcttgatactgatttatatattcaatatttttacgaatatttgataatttaatttgcgataattcaactccgtttatttttaatgacccttcataattagtatgaaatttcatgattaactctagtaaagtagtcttaccagcccccgatggtccaacaaatgcaactaatgagggcctatttatttcaaaatcaactttatgtaaaattgttttttcagaaccatatgaaaaggtcagacctcttgcagtaatattctcaattcttgtaacagtattagaacctttatccagttcaacgtttaaattcataatttgcaaaattcttgaaatgtttccttttatttctgaaatttgggaaataatatttacaatctctaataaaggactgataaccgtcaaaacataaagaaaaaaagatactaatttcggtatagacaagtcactagatatatataaattataagagtgataaaaaataaaaaaaagataagcaaataatagaattgcaccaacagttaaagttatagtctctaaagctaggattttttttataattttaccatgatttttaaagcgataataacttataaatccttcatagttttccgtcatcttacttttaaccaatttaatatttgttaatctttgaacaatatatgcactattttccccattttttaaacttctatcctgagataatttttccaatttaatatttaatggtagctgaattaaaataaatattggtagcatagataaaataataattgttaattgccaattgattaatattagtaaaacgatagaccctataacaataaatgaattaacaattaattgaggcattaaaacggaaaaaaattgtgctatactttctaaatcattcattattctgctatttatatcacctatgttcaaggaatatatcttggtaataggcagtttcaaactatgctgaaaaaaatttgcttgtaatttcgtcaatatatctatcccaattgtccctaaactataggttgataaactatgaataatgaaaataatggcaattactaataaacttaatattaaaattgatggtttgttatttagtaaagctatcttttcaggattaaatacaagtccaataataaggggtataaatagcgttaaaaccgcacttaatagcgataaaaagatgctaataaacaatttacatttattctgtactaaagaaaataaaaatcttaaaaattctaaattattcattttatctatccatttaaaattagtattcgatttttttaaaagtgttactattaatcaaaactaaaaaaaacgacacaaatataaaattaaatgctatgaaaaaaataagctctagataattcgaaccatcaaaaaaagctggataggcattgggaaaaatatatgaagtcaaagttagttttgcactaacaaaagaaaatagcataattaccgatactatcaataatgtcgctgaattattgaattttatagaaaaaaatgaagaaagcaaaatacaataaatgtgcataacaattatagatagtataatcaaagaggaatttttcaattctatattattaattggtaaaaaatgaccattagtataattttgatttatcaaatatgtataataggtgattaaactactaataattgtaagaaaaaaataaattacatatatacttaacatagatagtagcttagagaatataatactattgcgatcaatatctttatataagatgagtttccctgatcgtatttcatccccaatgcttacaataactaggtagatcaaagcaactaggggtaaaaaagtttgatattgcacatcaataacagcttcaaaaaaagttacaaagctcatagaattatctggtgcagaaagttgcatgaactgtgtatcaaaaaaagaaacaatgattaaaatgagaggaaataaagcaaagccaaatagaattaaactttcttttcgtatcaacgtcattttcaaatttgctttatataaattaatcatgatcatcaccttcaaaatacttgtctaaaggactatttaacgcaaaagatttaattaattgcttctgcgctaaagaaaataaaatattatttaaatcttcttgattgatagattgattaatactcaaaagatttttctccgttttatatgtcaaaaaattcaacacatgtgtatcgaaaaaatttcgtaattgtatttcttcagccaacaaaatgtcataagatccactcttttctgatgctaattcgttcaattgtccattttcaatgaataaataacgttggcaaatagactctaattcatttagctgatggctagaaataatcattgtagcctgatgttctaatctagcttcatttaaaattttgatgagtttttttacgccatctggatccaaccctacaaatggctcatcaagcacaagaaaagtgggttctgttagtagagacatagctaaagaaagtcgttgtttcataccaaaagaaaaagttgacggcttatctttacgattatcccataagtcaactaatttcaaaattgattctatattatttttaaatctttcagattggtggatagttaaataaaaatgcaagttttccaaaactgttagatgatcgtaaaaaacaggacgtataagtactccaaaattttttaactggtttgatctagaccacaaactttgtcctttatatattatttcgcctttagtaggtcgcaaagcttttattaatattttcaagagagtagtttttcctgacccattcctaccaactaaaccaacaatttctccatcatctattgtaaaagatacattttttaatgcaaaacgttcacttttaggatattgtttatataagtccttaacttttaaaaccattagtaattgctattccctttcaattttctaagtattaacattgttagtaatgtaatactaaaataaagcaataatgcaaataaaatttgtgataaatcaaacaatttaggactaataaatattacaacactttcatttgcactagcagaaacactattaattgtgttagcaaattgtggccataagcctgttctttcaaataatattgcactcgcaataaaatatatagttgaaataaacggaaatataagattacgtttataactatgtatatctttgtaataagttaaatatattgaaaaaaatatattcacgataatgggtgctaaatataggcatgaagttataaatataacagaagtatcaggcaatgataatgtcataaaaactatcaataatacatgcaatacaatagataaaaatagtggtccagcgatttaaatcatctcccgtacaatgatcatattaaactgacaataatgttatttaaactatgcaaagtaactgagcattcatatccaatatgaatataaatccattgcaatattaatgctgatggaaatttaattaataggttccctataacactcccatttagatgtaatatcattgaaaataataatgaagtcaatatataagaaatcccttgattactattatgcaaaaatatattatatataataaatctaaaaagatactcttctagtaagctcacaataattgctctatgaattataagtttattgtattcagccatattactagataaaaccagcataatagcaacaacaacaaataatcttaagtaatttacattcaattttatcttaggcggaaatatatttaaccaattcacaaatttccgaggaattaatacaaatgatatagtgccgaatataataaatagtatattgttaatagccaaactatttgtatcaaagaacattaagtgtaaaatattactaatatttattaataatccagcaatcaaaattaacgctattgaaaatagaacggattcaccaaatttcatcttcatttgtttttcctcttaaaataaaccattttgatttataatcctataacataaactgctatcgtgtatacaagaatattaatcctaaggatagatgaatactatccttaggatataagctaattaccagtgccatttcttgcctttatagccaatagacacaaaacctaatttaatctcattgcgagatagtaatttactaattaatgaaaacattattaacaccacctttcttgaattatacgcttatttattgtgaacatatttattataatatttttttctaaaaaaatcaagtacttgtcatgttttcttcaaaaactctaaagttatcaaacatatgctacactcgaccaccctattattaattaaaacatatactattctcatcaaactgaaggagaaaataaaagggcgatcgcccctctatttcatatcaccaatattacttgacaaagaaccagaaaaacaccggcttttttatgttgaagctggcgttttttcaggaccatttaatccacattatcaagtcaagcttttttacttattcatagtgaatttacttacttccccaggacgcggtcaaagtcaccaatggggtcatcgtcttcttcccaggctactagatcggccgtcacatcaacgactagttggctaatgtcatcactctggtaggcctctaccacctttaagatggctgggtcgtcttgccggtctcttagggtaacgatggcatttttcttcagcgggtcaacttcccggtcgctgtcttctacatcattatagatggcctcttgggggtcataatcggcatccacagtctgctgggacccgataatggctaggtctgtatctcccaaggcccgggccacttgttgggggtctaactccacaatctccaggccatgcttgacctcttcaatatcatcgaccgtcggagcagaccccgcctctgggtctaattccaagaggcccaggtcctgcaaggctaggaaagaccgctcagcattggtcaccgtgttgggaatggcaaccgaggcaccctcaggaatgtcttcaggactatcaatgccctcgacggcgaagacaaaagtaggcgaaatagcggtatagcccaccggaacaaagtcatcccccgaatcttccacatattccttcaagaaggccaggtgctggaaggcatttaaatctatgtctccatcagctaaggcccggttaggctggacatagtcggaaaaggtcacaacttccaagttcacaccttggtcagcaaccttgtcggcgacttcctcccagatgtcagctgaggcatcgcccactactccaattttcaagtgctcttcagcttggctgctttggcagcccgctagcgaaaacaaggacaaggctgctagagtagctaatattttctttttcattccaccatctccctttactaacaaacctgacttattcagaaaactcgtaaccttcttcagcccagacgacaatttcggagttctcactgacctctctgataacttccagggtatcttcggactggtaggcatccacaataatgtcaaaagattctctttcatcaccttcattggctgcaataacgttgatatagggttctgaattttcgtcagcaggttctaagaatatggcatcttcgtttggtttatagccggcatccactgccatacccgagttgataacggcagctgtgacgtccccaacggaacgagctgtttgggaggcatccagttgagtgatttccaagttcaagggattgtttgtgatatcatctgttgtaggtaggatgcccgcatctgggtctacttccagcaggccggctgactggagcaagaccaaagccctgccttcattggaaacctcgttaggaatagcaatttcagcgccctcactaatctctgaaacatcttggacttcttctgagtaaatccctaagggggcaatgacggtgtcggcaatagggacaatattggatccaaattcttcattgaagctatccaagaaaattcgggtttggaaggcattgagatcaatatccccctcatctaaggcacggttgggctgggagtaatccgaaaatgaaactaattccaagtctattccctggtcagccaccttgtcttggacaaattcccatacatcattatcttcaccgataacgcctaaccggaccacttcatttgcttggttcccacacccggatagggcgaatagacttcctgcactggcaagggttaagagtagttttttatatgacataactcattatcctttcttccacataatccttcaagaaggccaggtgctggatggcatttaaatctatgtccccatcagctaaggcccggctaggctggacataatcggaaaaggtcacaacttccaagttcacaccttggtcagcaaccttgtcggcgacttcttcccagatatcagtagagctcctaacactctttttcatcccattatctctcctgcctgacaaacaggacttattcagaaaattcatagccatcttcagcccagacgacaattacggaatcttcactggcctcattgatgacttccagggtatcttcagactggtaagcatccacaatgatgtcgaaggattctctttcatcgccttcattagctgcaataacgttgatataaggttctgaattttcgtcaacgggctctaagaaaacagcatcttcatctgggatgtaaccggcatccacggcaataccagagttgataacagctgcggtcacatccccaatggaacgagctgtttgggaggcatccagttcggtgatttccaggttcaaggggttgtctgtgatatcatctgttgaaggcaggatccccgcatctggatccacttcgataaggccggctgactggagcaagaccaaggcccggcccccattggtgacatcgttagggatggcaatttcggccccttcaccaatctctgaaacatcttgaacttcttccgagtaaatccctaaaggggcaatagctgtatcggcaatagggacgatattggttccgaattcttcattaaagttatccaagaaaatccggtgctggaaggcattgaggtcgatatccccgtcgtctaaggcacggttgggctgggagtaatccgaaaatgttactaattccaagtctattccctggtcagccaccttgtcttggacgaattcccagtcctcgtggtcttctccaatcacgcccacacggaccacttcatctgcttggctgccacagccggatagggcaaataaacttcctgcactgacaagggttaatagtagttttttatatgacataactcattctcctttatacaaatgtattttatttacttattcttatgactggttttgttgacaaaatagttgccgatcccttgactaataaagacaaaggccataataatcaaggtcgaaaccagggtaacgtcgtgttggaaacggttatagccccgggtgatggctaggtcccctaaaccgcccccaccaacagcaccggccatagtggtggtcccaatcaaactgacaatggtaacagaggatacccgcaagagactgggcaggccttccttgaggtagactgagaagataatgccaactggactggtccccatagcctcagctgcttcgacaatcccatcatccacttccaagagggcggactccacctgtttggcatagaaaggaacagtggccaccacaagggggacaatggccgctgtggtcccaatggtggtccccacaatggcccgggtgaccgggtagatcaaggccagcataataatgaaaggaatggaccggaggatattgataatattctccaagatcttgtaaacatagcggttgtctaagatattgcccttgtgggtcacggtcaaagtcacccctaaaataatccccaaggcccccgcaatcacagcggtcaccaaggtcatgtacaaggtctcgatcgtggtttcgacaaaacgttctggtatttcacttgagtagggcaaaagctgctcaataatatcagaaattgcaagtagggtcattctgtatctccttcctctgaaccaatgtcactacgagggattagcttgtattcttccccgtctttgacatgttccaacaagccaactgtcacatggttttcttctaagtagcggtaagactcctgcaaactctcatcgtcccctgtaaagatgacaatcaggttcccgatgtagtctccatttaaaatctcaacattcccgtagataatattggttgaaatgccataacgctcataaacttccttggtaaaaggctgaccagcactcccctgcttaaaggtcaactgggcaatctggtccttgttggtcaggttcatcacggtctcctgccggctcaatttctccaaggcctggtcaatcccaagggctgtgttgatgaattcctgggttagggggttctccggttcagtaaagatcttaacaatgtccccccgttcaaccacttccccgtctcccatgacggctaccttgttgcaaatttccttgatggcgtccatctcgtgagtaatcaagacaatggtcaagcccaattcctggttcaactgtttcaaaagctttaaaatatccgtggtcgtcttggggtctagagccgaagttgcttcatcacacaagaggacttctgggtcattggccaaggctctggctatccctacccgctgcttttgcccaccagatagctgggagggataggaatcatgcttgtcggccaagtctaccaattctagtaggtcggtgaccttggtttgcttttcttccctggataagtcagacgaccgtaaggcatataagatattgcctgctaccgtccgggcattcatcaggttgaagtgctgaaagatcatgccaatttttttgcgggctgcccgcaactcactggctgataaatccagcatgtcctggccattcacccggacgctgccattggttggcttttgcaagagattgatagtccggaccagggttgacttgccggccccgctgtagccaaccaccccatatatgtcccccttatctacttttaaactaactcctttcaccgccttgatgacatgctcatctgattggaaatgaacatcaatgtccttcagctcgatcattcacttgtctcccttcatttgaaattatcaatcctacaaggggtctgctcacttagctaggtcaaatccccggtaaagttactcccatcctgtatgcttggaggagcaaaatttcttaacctaaccactgctttaaccttgcaggcactatatctagcctacacctctaggaggtcttaggcctactattttgaatataaaaaaagtccttaattaaaccacttgtttaattaaggacgacagtgccgcgttaccaccttgtttggatataattccccctctagagttaagaactcctcttgataacggtgtccccgtaatggtcttgctttttgctcaaccattaaacctatgtcaaaagccatgttcagttaaccctacttgcttactttcaccgagtgtaagctctctgtcaagcgggtaataacttactcacttttggtttttatccctataaaaaaatccttgtagctggttaaaccagctacaaggacgctaaaatcttagtcgtgttaccaccttgacttatagcacaattgctcatgctatctctacaacacctatcagtgccaacaaagtaacgcttgttcaaacgtaaccaactcgccaaggctcatcagttagcttctcagagaccattttccaaggccatcctttactccatctcaccaagcagagctctctttacaaaggattcaatcttgtacttatctcttctaggaagtcaattttcatcttgctaaccatattaatataagttttatagaattgcaagctttatttttcattttgttaaaaaagtccatcaaagtccatttttctatccggctaagatcagtctatggactgatgtttgagactgtcactgggctatactaaagatgaagaaagggcgaccaccgacaataatgggtgcaaacctagcctaggaggtccaagcatgaaaattttaatgacaagtgatttatacactccagctatcaatggtgttgtgacatccatccaaaccctaaaacaagcactggaagcagctggccatgaggtccgggtcctcaccctgtcgcccaaaccaggttttgacgaaaaggagggggtttattccgtctcctccattagcttaaacaaaatttacccaggagcccgagtctccttcaccaccactgattggattaaagaccaaatcctgaactggcaacctgaattaatccacacccactgtgagttttccacctttaaaatggccaaagctattgccaaagacttggctattcccatcgtccacacctaccacaccatctacgaagactacacccactacttctctcccaacaaaaaaatgggtaaaaaaatcgtctcccttatatccaaacacttactcaaccaagtaaactacgtgattgcccctacccaaaaagtcaaagacatgctaatgggctaccaagtccaaagctccattgccatcatcccaactggtatccctagccaaaaattcagccacgttctaagccaagcagagcgacaagagcttcgaagccaggctggttaccaagaaggagaccggctcttggtcttcttgggccgactagccaaagagaaaaacctgtctgaaatccttgactacttaagccagagagaggattcaagcctaaaactcatgatttgtggggacggtccttacaaagccagtctccaaagtcaggtaaatgaactcggcttaagtgaccgggtccacttcaccggtatggtagaccctaaccaggtagccaactactaccaaatggcagacctctttgtgtctgcttccaccagtgaaacccagggcttaacctacatcgaagccctcttcagtggcctccccctcctctgccggcaagacgacagcttgaaggaggttatccaaactggtttaaacggctttgcctaccaagacgtggaggacttctaccaaaaactggaccgcttgttggccgatcctaaaacccttagtcaaatgggagactttgcaagaagccaagcccttcaatccttctcagcccaagcctttggctcaagcggtctcagacttgtacgaagaagtcttagatgaccatgtgccagcttctagccaagccaaaagtcacaaaggcctctccaccctcagaacttgggggtagggcttatggcaaaggtgcaatcgcgaactgttatcaatggtttaaacatcctaggcacaattggggccggcatcttccttatctgggccttccgggtcaacctctttaccaacccggaagtcatgcgtcactatctcgaccaatttggtagttgggccggcccactctttatcttcatccaatttatccaagttgtcctccccattattcctggggccatcaccatcccagtgggcatcttggtctttggccatgtcaacggttttttactcaactttaccggcattatgatcgggtcagtcgtcaactactacctcgccaaacgctacggcagaccctttgtcaaaaccatagtcaacgaaaaacaatacaataaatacattggcaagatcgaaaacagccggctctttgaccgcttgtttaccttctccatgttctttcccatcagtccagctgacctcctctgctacctagctggtctatccaatatgtcttttaaacactttttcttgtccctcttttttggtaaaccctttaccctcttggcctactcctatggtttactcttcgtcttaaatatctttgaacaccttttttaggaggtttcttcatgaaagtttacttgcttagtgacatgctcaaatcaatcgaaaaaagcggggttggccgggccttggaccaccaaaaaatggccttgcaggcagctgacatcccctataccacaggtcaggagggtcgcgtcaaagactatgacctaatccatatcaacaccatctttccccagtccctcctcaaggcttgctgggccagactccggggcaaaaccgtggtctaccatgcccactccaccgaagaagacttcagggactcctttaaactcgccaatgccctagcccctctctttaagctttggctaaaaatttgctacaacagtggccacttgattgtcactccttctgcttactccaaaagcctcctagaccaataccaactcaaggctcccatccaggtcatctcaaacgggattgacctcgactactggcaggccagccaagaggaaatacaggcctttaaagcccgctaccaagctgatcccaccaggcccctcatcatttcagtgggcctacccattaaacgcaaaggaattattgactttgtcgaactagccaaagacctgcccgactatgactttgtctggtttggccacactgatatccgcttcttgccgaaagaggtccaacaagcctactacaccaagctagacaacctcaaatttgctggctacattgaccgcaaagacatccgggtggcctatgctgcttgtgacatctacctctttttgacccatgaagaaacagaaggcatcgtcctcctcgaagccttggcttctaaggcaaacaccatcgtccgagacatccctgtttttaacaaagacttccatcatgggcaaaatgtttacaaggggcagaaccttgaggaatttaaaagcctcattcaagacctggttcaaggcaaaattcccaacctgacccaggctggctaccgggcagctgcagccaaaagtattgaccaagttggccaccagctcaagctggcctaccaggaagccatggacttggccgacagccagaccggcctcctctctaaaaaagccaactaaaaatatccactcctagcactagcctagctaaagctccgtttttgcttcagttagaccctagtgctagtattgttttagagatacttgacacgggaggcaagactgtggaaaaaatggacttatatgacggcaacaaacgacccctaggggagaccattggccgccaggaaaaaactggtccagggacctataccttgatggtccatggtcttttaatcaatgactcaggccaggtcctcagccaaaaacgggtagagactaaaacaaactggccaagcttatgggacttgtcctgcagtggggcggtcaagactggggagaccagccaagaagctttaagccgggagtttaaagaggagttaggcctggacttggacctcaagaccacagcccccatcctgaccgcttcctaccagcaaggcctgtccgactattacctgcttccttactcaatcgacttggccggcctccaaatagccaaagacgaaatccaaaacgtccagtggctagacttggcagacctgttcgcctacttggaccagggccgctttgtcccctaccaaaagtccttcctccaggccctctttgatatctaccaggctggcagcgaaattttacccgactgacaacttagtcaggaaactattttattttttgaacagtttaaattataataggtttatctagaaaggaggtaagtaaatgaacacagcttttgtcgttgacagtactgggactctttcccaagacttactcgaccaagacaatatctacgaactaaccttgagtaccaccttccctgacggaaccacttataccgacacccgggatgacaagaagactattgagttctacgagaccatgacagcttccaaagacttgccaaccacctcgcaacccagcccccaacaatactccgaaatccttgatgacatcaaggctaagggctatgaacacgtcattttcatcctgctgtcttctaaaattagtggtgccctgcaatcagctaaagtggtggccgaagattatgccgatgactttcatacttattttattgattccaaaggcacatcacttttaattgaaaacctggttgaacaaggcatgaccctactcgatgaagggctagaccaccaaacagtttgcgataaactccgttgggtggccgaacaaaccgatattttcgtcgtagtggaagacctcaaaaacctggtcaagggcggtcgcttgtccaaaggagaatctttgatggggaacctactccggatcaaacccatcttgatcattgacaagaacggtgaagtcaaaccctatgaaaaagtccgaaccctgaacaaggccctcaagcggatggaagatattgttgacgaaaaaatgaaattatttgatggcaaggctaaaatctgctttgcccatgccaaccgggaaaagaaagttgccaaggagatcgaaaaactccaagtcaaatacccaaacaccagtttccggtcagactttttaaccgtgattttaggtactcactctggcgaaggagctattggggtaggcgttattccctacgcaagcaaggattaaatactaaaaacaccactcctatagacattggctgtcttttgggagggtgtttttctttatctatatctattatgcttaaatgcccaggtccaatttaggtctggtctgccagggttttccgccagtaatagagggtaaaggaaatggtaaagactagggtgataagctcaaccacaatcatggtggcccaagctccctcaacaccatactgactagctaggaaggaaatgatgggcggaatcaagatcagacttcgcaagagggaaatcaacatggaggcaaaggcccgctctatagcagcgagcaggtaaatggccaagatatttaaaccagctaagataatggacaggctaaagaaccggatcccctggctggccagcatagccatttctggattgtcattccggttaaagagagagacgatctggtcagtaaaggacaaattgatggtcattaataccccgccaaccaaggcaatggccaaaatgctgaatttaaccaggcgcttaacggtttggccccgggtcatgccatagtaccggctaattaagggctggactccctggcccatgccttggaagattaaaagggccaccaggttgatattggcaaccactgcataggctgacacccccacatccccgactaagaccagcatggcctggttgaagaagacaataatcatgcctgaagccagctcgttgaggagggatgagaaaccgatggaaaagatccgtcgcaagcggtcaaggcgaaagcggaaaggagcaaaggcgagtttgcgcttggtataattgaggtggagggtcaaaaccgccagggtaatagccggtgagaggatggtggcaaaggaggcccctgccatcccccaattaaaccagtaaatataaatgtaatccagtataatattactaaaggcacccgacatcaaagccatggtagctagcctaggattgttgtcatttcggacgaaagaaacgaaagtatttgctataataaaaaaaggaccatagaaggcatggataataaagtactcttgggccaggccaatggtttgaccagatgccccgaagaaatagagaatgggttcattaaagaccaaaaggaggaggcagacaattgtagccacaattgccgctaacttaacggtaaaggtaaagatcccattcgcccggttcaagtctccctgacctcggacgatagagtagagggcggctccgccaacaccgatcatccaaccggtcccgtggaggatgttgccaatggggatggcgacatttaaggctgcaaccgcttcctggccgatcccgttggcaataaaaaaggtatcggctaagatgaaaatggccacgccaatcatcgaaaccataccggaagatatgtattcaaaaaattcagccaaaagcgggtgtttctgacttgccactggctgcactcccctttcttagaatccaccctagcttaccaagcaattcaaaactgagcaaggatctcattgttcacaggaggtactcatgacatgaaagcagaaaatagagaaaccaagcttcgcccaatccaggcacaagacatccccgctattaaggccatcatgggccaggaatggtaccaagaccttttacagaaggaccgggaagcaggtcaagcctttgtccatttcgatgtccaatcctgtctaaacgccagtagcttcggcctggtcgctctagtccaaggtcaacttgtcggggtcattatggcaaggtctgacaaggacaagcgaaacttgcgacttttaaataccgataccacgcctgctttaatgaccctcctggccaaagaccacagtatccgccaagaattggtcgacgactactacttggaacaaaaaacttaccgaagcttagaagaagcttctgacttagtctaccaaggggagattaccctttttatcctgactcctaatgcccggggtcaaggccttggtcgccagctcttccaggctaccttagcctactttaaagaccagggagtagactattacttcctccatactgacgaggactgcaccatttctttttaccaaaaggctggacttcgacaggcccaggccatccaggtccaagatagccggcaagttcctttgtattactacctctatgacaatggtccaagctagctactagccctaatccggggcttctggggcttctagatcttccgccctgtccaattcctggtaaaattggtctaaataagtcaacataaactggtgacggtcttgggccaaggcctgaccaatctcggtattcatctggtcttttagcaataatagcttctggtagaaatgattaatcgtcgttggtgtcaagtcgcttgggtcatcctgcaaacgcgggtcagaagccgggtcccaaatagcctggccaaggcttccaccataagtaaaagcccgggctatgccaatagctcccatggcatctaagcgatcggcatcctggacaatttgctcctcgaccgacagactttcttgggcaagctgtttgtggtaggaaatggactggacgctggctaaaatttgctccatcttgctttgggacagacccagaccttccagaaagtaagcaattttttccaagccagcctcctcatcccctaatttctcatccgccagatcatgaaggagggctgtcatttggacaataaacaagtctccttccccttcttggctgtggatataacaagccgtctgccagaccctttggatgtggaaccagtcatggccagtcccttccccgaaggtttgacttttgacaaaattaaccgtttcttcaatagcctggtcactaaaactcatacttccacctcacagttttttagaaaggacttctagcttgaaaattatcgttgatggagatgcttgtcccgttaaagatatcatcgtagaagaaagccaaggccaaggggtctctgtccttattgtctctagctttgaccattacagcctatccccttatcccgaccatgtccaatgcctgtatgtggaaaagggccgggatgccgtggactttaagattgtccaattggcccaggcccaagatatcgtcgtcacccaagactacggcctagccctgatcttagtcaacaaggtcaagtatgtcctccaccacactggctttatctacacggataagctactagacagcctcatctaagatcgctactatagccaacaagcccgtaaaaaaaggcagcgggtcaaggggccagcccccttgaaagaagcagacagaaaagcctttcgccaaactctccgctccataatctctatcctttaatcttagcggttaaaaagtcgggcccaaaaccctttagcctcttgcttttctttgtactccaataattccgtcttgtcttccaaagccgcattcaattgcttctgggttacggcttggagttgttgctgctggtccaagagacggttaagttcatcgatttggtccgcctgacgaccattgcgggtattggattccctgatctgggattctttttcgtcaattttaagctttagctggtcaatttcagcctccaagtcttcaatcttttgggaaaggtcctggctagcactggttaagtcttcttcattggctggtttacctgtaatggattcaatcaagcctgcttgttcctcttccgttaagacaatgatcccccgggcatttttggtccggtcagttgaagcaaccttctttaaatgattatgtacagtttgcttggttacgtccaaacgatcggcaaactcttggatggtcgggtagtcactcatggcttcacctacttcctaaagaccataaccacaaggctagggtcggcctttgtcaattttggtcaaattttacatctattttgccacatttgacaagggctgtcaagtttagaccttagggataatatctgtccaatctgacctaggtcaacggctaaagaccaactatctactgtaaaaagttggacaggatttggacaatggtttttgcaggtcaatccgcctaatttgccaagcttgccagctgaataaagataaccgaagcaatcgagctacattcaatagaaataattcttattaaagcttataataagtctaggaggtgggtcttatggccaaaaagctattgactttcatactttcactggtcttgctttcagcatgttccctctttggccaagggggaggagtgggggcagcttcggctacaatcaaaatcacagtcagcgaccaggccggcattgaacgggaagtccgctttcaagagggggaccccctactggaagtgatgaaagaccattttgacatcaaaaccaacgagtcagacaccgaaatcctagccattgaccaattcgatacccaggaagatgaagaaggggcctactggatttaccgggtgaaccagatggaagcccggacttctcccgaccagtatgagctaaaagacggcgaccaagtcgaatgggtctactggtcctataagtcagctgataatccataaagccgatacaagagttgggaaagccattttgagataaagtaaccaggctagttacaaagactatttcaccctttaattataggacccttatgaaagtgttttttagagttttatacagaatctgacggaaaaagttgatcaacaatttagctgataaaagttgtttttctaaacaccatgtgctatattttagaaaacaattttgctttaggcccacttgtcttagctactccataggaaagttcctcctattacatggacttggaagccttagttgaatagatttcaatgacaagtacaggggataggactattcctatccccttttataagccaataaaaaggagttgggctagtggaattactaaaattaactgctaagcggatgctttttaacaaattaaccttgattttactgttcttgttttttgttttagtcctcatggatagttttctttacttgactaccttagcctatactcctgaaacaggctatgcttttcctcatgctttagaggtctttattaccaggcacgacgaatcaacctccattttgcctctgttccttcctttctttgtctttgggattgctggggattattttttcactgataaaagcagtggcatgatgaccttatctgccctacgtattggtagacgccaccagctcatagtaaatattctaagcacttctttcatcactgcttccctcattggcttactctattctgtccttttgatagcctatctttttatcttcccactccaagaaaataatattatccatactttcctagtagagggacaatttgcagaccttcccctctatgcttttagcttaattctggccaacatattggctgccatcgctttccaattgacagggcaagcggtcggcatggtcgtttctaaaaaatcccagctctatatagccttgtttttaatcatttttgccatcccttataccctctattatgccttagatccccggcaattccctatttttaactacacacccatcatctttttactgcaaaccctacaacttcccgacaacattttcaaagtattcatttattggctggcttacattgctttagatttactggtcatttttactctattccactataaatacctgccatcaccaaaaagaggaggctagccatgtcagaaaaaattaaacttgttcaattatccaaacaatttaagaaccgtcaattatttcatcatattaacgcttcctttcctagtgccaaaatcacagccttgctaggaccaaatgggtcaggaaaaacgaccctcttaaaaatgatttgtggcctgtcttaccctgatgagggtcaagtattactagatggacaattactggctaaagggaaacttgccccatctgtcggtttggttctcggtaacccttcctttatcccgaccctatctggctttgataacctaaaatttttagcctccttaaaaaatcaattgactgaccaagacatccaaaatgtcatggaaaaagtgggactcattccctctttaaagaccaaagtaaaagattattctttaggcatgaagagccgactcagcctggcccaagcgataatggaaaacccggacatctttctcctagatgagcctactaacgctcttgaccaagagggactatccttgttaaaagatatattggtcgaatataaaaataaggggaccactattgttttaatctcccacgacaaggattttatccaagacctttcagataaagcttaccagatcaaccaggctgacttacaggaagtcagcctatgatcaagctagctagtctaaaaaaactgtcattgctacttttaatctttgccttgattggccttctagtcagaatggagagccttgagttcatgatggctgccaatttgctaaacagcccttccgatcttggtttagtagacttagtattcaatctttttaccctccccttactcagtatttactgggtcctcccccttagctttagcttatactacttaaatagcttttcagagacttttgaggatgatttttttgatatcctagtcctgcgttttgatagccgcccaaaatttttataccagcaatttaagcaactcctagagatactagtggagtacttggtcttgttactagcctcatgcttactcctttggtttttactgggccaccgactagaggacaatcattaccactttattattaaccaaaccccttcacctcttctcattgattttactgttgtaatggtttatatcatattgggtttatttatggttggcttattgaccctttttcttttcctcctaacccaaaatggctttgccgttagcctagttatccttgccttgtgtttaagccatgctgtcatctaccttatcaatctaccagattacattagtgccttattaccctttacccagttttccagggcatccagccagattttccaaccctttgggctggctgtcgactggtttactccaatttttcaattgacttacttagttctgctgatccttgtccttattatagccaacactcggatcttcaatcattttgaaagatagaattgaaaggaccaagtctatgctcggaagaatcgtcatcgcccacttaaaaataactttcagcttaaaacgcctggccctgttctgcctagccctccttttatttctagctttccggctcattagctttcaaaattatctccaactattcgaccgagaagcaaacttaatggattggcttttatatagtacagggggagctgttggcgacaaccgactagccagtggcctcttctttttcatccttctttttttgcttctaacttttaactggtcaattccaggaagcgatccttccctttctgccatccttttaaccaagatagaatctcgcttaaagggtttatctgctttcctccttagccaagtggtatcaactattatttcgcttgctatcatcctgctactagcattagtaatgggtagctacttttttccgccggctagggcaggtcaattctttcattgggttggcccattacaaacttttgagatggtcctggtatttttatctgtaacgtttggaatctctatcttgtccatcctccataacctacagtctttactaacaggacaagattctgttaatctttttctcagcctggccgggcttttggtcttaatcttttttcatattttttgcccccttttagacccggtcaaccccgtcggacaagtgtcctgggctagctatttgtcaaataccagctcacagtttttcacaatcttaggtccaaccgtcgtctggtcaatcatccttttcaccttgtatcaaactactcaaaaatcaggttaaggtcttgccctggtcgccactagccccaccatgaccaaatcaaacttaaattcttattgtttactggccgactttctgataggataaacatataaacgatattgctaggggagctagagagctgagagtggttaagaccagaccctttgaacctgtcacattcgtatgtgcggagggaaagcaaggcctttttggcatgcttattttgcctgcccttatcttgaaaggccatctcactagctcctttgctcaagaaaggagtttttttgtggaaaataatgctacccggacctttgtggaaggggccttgatgatcgcggtcgcccagatcctgtcttttatcccaactggtattgggtcctcattctctgtggacatttcttctatcccgatcatcttattcgccctccgccatggctggaaaaaaggggtcatcgttagcctagcctacggtatttttaaaatcgctatcggagacgtccagtggctgacctttacccaaggcatgatcgaatacaccattccctacttctgtatgggctttgctggggtatttgctggcccattgaagaaggccttggcccaagactctgataaaagagggatccagattatttcggtcgctaccctctttgccatggtcctccgctacttctggcactttgtagccggtgttatctactggggcgaatttgcaccagagggttggaatgaagtggtcttctccgctgtctttaacggggcaagtggactagccaccgctttggctgttatcctcgtcatcggctttttattcaagtcttcccagcgactctttcgacccaacttccgctaagattatcgggttcttggcctggtaatggctgtaccaagtcaaggtaaaattcctctcatattattcttgcaataatattattttcctgtataatcttacttaataaatcaaagcgtcgattggaccaagctatttttattggcctagagagtcagcatgtggtggaagctgaaccaataaatatagatacacacccatgagttgtataaaaaaattataccgttagttacgttaccactgtgttcagacacactgagcctccccttgcgaaaggagaggaaataaaggtggaaccacggttagacgtcctttttctaaaaagggcgtctttttttatcaacttttacaaacaggaatagaaaggatgagacaggtgaaaaacatttggctttacttcattgaaagacgaaaaatctaccatcattggaccaagctagttgctagccatttaacttcaacacaaaaggagcatacctatgttaacaaatcctgtctttttatccgttgtggttgtcttggtcctgtctttggccaagctcaacgtcttaattagtctgatcatcggagccttggtagctggctttttggccggcatccccctcggccaggtgatggaggtcttagtctctggcatgggaggaaatgcagaaacggccttaaactatatcctcttaggtgccctggctgccaccattagccagactggcctagacaaggtcctggcccagaagcttgctaaggtcatcaaggacaatggcaagatcctggtcctcctcattggcctggtcagtatcttctcgcaaaacttgatccccgtccacattgcctttattcccattctcatcccacctcttatccccttgatgaacaagcttaaaattgaccgccgagctgtggcatctgctttaacctttggcctcaaggcaccttacttgtccatcccggctggttacgggctcatcttccacggcatcttgcgggatgaaatgtcggctagtggcctgccggttgatttaaataatatctggcaggtgatgtggattccaggcctggccatgctagttggcttcttggtcgctgtctttatctcctaccgtaaacctcgggactacgacatggaccaagttgacctggaccaagacgagtcagacctgtcctttacctttaaccacttaatggccttaattgctgctgtgtctgctttggtcatccagctcacaattgggtccttggccttgggtgctatagtcggcatcggcctcatgctactgaccaaggtagtaacctggtccagtattgacaagatgttagaccgggggatcgggatgatgggctatatcgcctttgtcatgctggtggctgctggttacggtgaagtcatccggcaaagcggagggattgaagacctggtggcaagcattgtcgacttggtcggcaacacccccttcctggcagcagtaggcatggtcttagtcggcctctttatcaccttggggattgggacttcttttgggaccatccccattatcgcagccatttatgtcccccttgccctggaacttggcttcagcggcccagctaccatcctcctggtagggacagctgctgctttaggggatgccggttccccagcatctgactccactttggggcccactgccggcttaaatgtcgacggccagcacgaccacatccaagataccgttattccaaccttcctccactacaataccgccttaatcctctttggcctggtcggtgccactatcttataatcaatgaagaaaacaaaagacgggtgcgagttgcacctgtctttttttatttttataccaaggtcaagtctttctcaaatcaaaggtcatgttcaaccaatctttattttagccaagacgaaagcatggcaagccctttaaaataatgtaaattctttgtacatttcctctttccttttgtgaaatgcttacaagtagtctataataggatgtaagcgatgatataaatttttttaatagaaagaagggctttcatgaaagcagcaagattctataatgcaaaagacattcgggtggaagaggtagaccgggcgtcagtcggaccaaatgatgtcttattgaaggtagcctgggctggtatttgcggcagtgacttgcatgaatataatgcgggtcctttgaacatacctggtgacaaacctgaccccctaactggccaagtcaaacccattaccatgggccacgagttttctggtcttgtcgaagaagtgggatcagatgtcaaagacattgcagtcggcgataaggtttgtgtcaacccgatgattttaagtggtaagcacggaggtggcttgattgacatgtaccaaggtgggtccaccattggcctagcccaagatggtggttttgccgaatacgctgtctttgaagccaaacatgcctacaagttaaacaaggacacttcccttaaattaggtgccttggtagagccgattgctgttgccatgcaagccatccgggaaagtgagttgcgcttcggggaatcccttgctatctttggtgtcggcccaattggtctcgccctcattatggctgcccgggttgcaggagcgcgcgaaatctttgcctttgacctgtctgacaaacgtttagaaaaagccaaagaactcggagccacccacaccatcaactccggaaaccaagacccggttgaatacatcaaacaatactacccttatggtgtcgaccgaagctttgaagtggcaggggtggatgtcgtcttcaagcaagccatccgagctactcgaccgcgggggatggttaatgttgtctctatttacgaaaccggcatcgactttaacccaatgtggttgaccatttccggtgtccacatttcaactagcttgggctatgaggacgatatttttgaattaaccatcaatatgattgagagcggtcaactagacccatggcctttaattaccgaccaaatcgaattggacaatattgtgaaagatggttttgaacagttgcaaaatgacaagagccaggccaaaatcttggttcaattaagcggggaagaataaagttcttactccaagactaaaagcttccaagcaggcacctgcttggaagcttttgtatgtgcgcccggcatgggtgacaacttggtggtgaaagtccactgcaggcctggcagtaggaactgttagctgaaggcaagggtgtccatcgtgaggtggaatctgaaggaagctggaggcaaacactcgcactgacgaacagaaacttcatatcaaggctgatttgggatggatgagcttgcataacaaagtaaagtccaatactgcacaagtccctttcagtaaatgaagcagtgacatgagtggaaggttgtcacaccttactcggggaggtctcactagcgtttagtagtaacaacgaatagtgagaagtcagccgaggtcatagtagctacgttgtagcgaaggactgaacaatattcatacaaagtatagaacggaggttaaagtttacgaataggacagaaaacaatcgaagagattggcaatcggtggagagaataggtggaaccgaaagggtaagccgatgcgtctagtaaactttaggtgaaatgacagaaatgtatcgtaagtctccaaacttaatggagcaagttgttgacagaagaaacttggaaacagcagccaaagccgttaaacggaacaaaggcgctgcaggtattgacggtatgaccgtttttgagatagaggagcacattcaagcgtattatcaacccttacggaagaaattacttgatggaacgtataagcctcaaccagttaaacgagtagaaataccaaagccgaatggagaaaaacgaaagttaggtataccttgtgtgcgggatagagttgttcaacaagccatacggcaagtaattgaaccgattatagacccgcacttctatgacaacagtcacggattccgaccagggaaaagcacgcacagtgctctcaagcaatgtgcacagtattataaagaaggctatcgagttgtagttgattgtgacctcaaacaatgctttgacacgctcaatcacgacaaacttatctattatcttgaacagtacatccaagataaaatgatactgaaaattatccgtaagtttttgagagcgggtgtaattgatttgactagcgaatttatcgcagtgaaacaggggcaccacaaggtggtgttctatcaccgcttttgagtaatgtgtacttacatgaactggataaagagttggttaaccgtggtcaccgatttgtccgatacgcagatgactttgtcatctacgttaaatcaaaacgagccggtgaacgggtaatgaacagcatcacacgctttattgaaaaagacttaaagttaatcgtcaatcaagacaaaagccaggttgggtctcctacccgtttaaagtttttgagctgtctgatgaagcaagtgaatggggattatcgttttatccctaccaaagaagccaagcagaaattcaaacgcagattgagaaagctgaccagtcgtaaacggccaggtacttttaaaaagataatgactgaaattaatcgagtcacccgcggttggattaattattttggtttaggcttcattaaaagctttatcaaagaagttgagcaatggttaaatcaccgtatcagacagctgattcttaaacggtggaaacgtccacgaactattataccaaagttggaacaatatggactggacttagattcagccaaacggattgcgtattcacgcaaaaagtactggcgactgtcatgcacacatgaatttcatcgtgcaataacaacagaaagactcagcaagtggggcttagttccactaagcactatcgctgagtctgcttacgcaagatattgaaccgccgtgtacggaaccgtacgcacggtggtgtgagaggtcgactagccaattaatggctagtctcctactcgattttgtattagttaatagattggtaatcagccgctagaccctttttgacaccaggtcggtcggcaatgttttgcgcccattttcttaagttggtgtattctgtgacattaaggaattcatcagaccgcttatacaagttgcccaagaccagctctccgtaccaaggccaaatggcaatatcagcgatggtgtattggtcgccggcaatataaggtcggtcagctaagaccttgtccaagaggtccaactgccgcttggtttctttggtaaagcggtcaatcgggtattccatggcttctgaaatatgggcaaagaagtggccaaaaccgccacccacataaggtgcagccccaatttgccagtagagccagttgagtgtctctgttttttggtggatttcttctggcagaaagtggccgtatttattagctaaatactgaaggatagaaccagattcaaataatttcaggctaggatctaggctctggtctaccatagctgggatcttggagttggggtttagcttgacaaagtcagacccgaattggtcaccttttgtaatatcaatcttgtacaagtcatagtctatatccttgccgagttctttcaactcttctaagataatggtaatttttttcccatttggtgtccccaaggaatacacttgcaagggagcatctccgaccggcaagtcttggtcgaagcggggacctgctgtgggtcggttgccggaaagatcagggttctcttccttccattcccaaacttttggtatttgatagtcagacatcaaatcagcctccatcattttattatcagaaatcaacagtcactagattcattatactaaaagccaggctgaccgttaaaagatatgcctaactgcttgtcgtacagcttaaaccaagctttaaaagggcctcgatagctggaaattaaaactttacataagtttaactccaggcttttgacatccccctgcttttatttataattaagcttatgtgattggaaaggatgatgacaagtgactgatggaatgcgcgatgccaaggacttgcacttgggggacagctttgaaagtgacagctaccaagtgaccaaggaagaaatcattgaatttgcccaaaaatatgaccctcaatacttccatgtggatgaggaattggccaaggatggcccttacggcgaattgatctcaagtggtttgttgacggtcaacctgggtatgcgactctggttagacagcacccgggtcagaaatggctgggtcggcttcaagacagacttgacttgggtcaaacccgtcaaaccaggtgactctatccgggttaagtctaaaattagccaattgaaaccctctagcaagaaccccaaccgactcaaggtcgtctttgacctccaagctatcaaccaggatgaccaggtcgttttagaacaaagcaccctttgctttacctacctcaataaaggccccaaagcttaacaaaccaaataagcctgacccaaccactacccacgtggctggtgtcagactttttttgaatatgttccctgctagcttcttgtagcgactggtccaagcaaggcaagtaaaacagccacccttaagaagggagtggctgtttttgattatggtgcatcttttaaggtccattgaatccgggccttatagggactaccggattgggcataaattgggttggtttggattaaaaagccttcattctctgcccaagtgacctgactggtatagtcaccagtttgggtcacgttattggaccggtcagtcgctaccaagacatcctggccttccaatacttgagtggtgttggtcactgggttgcggtaaaccaaggcgttagggagctggtggccagcctggttggtcaaaggttcaagggcctggacagtcagttgccagggctggtcttgtcgggtatccaaaagattagcttggactggctgggttttaggaataagctgattagcctggtccttgatctcagttgtttcaaagttaagattgtcaacggaagtcaattccaaccggttgccttgaacaacttcatccacccaaccagactgaaccgtcccccgccgggcataaaaggttaatcttgtcccaattgggaaaggctggtctagggtaaaggtaaaccggccctgtgagtctgcctgggtttggccgatgacttcagaatcctcacctgtcatgaagaccgtactgtcggccggggcagtccctgtgatttcggtcatggtatctaggattggcccgtcaatgtcaggatcgtccaagccttcaataaattgccaccgcctattattgcggggaaattggctagggaaaaggttactagctgggttggtaacgacatcgctaaaaccatcaggggtcagggtaaactggcctctgtcgaactgttgtgtttggataccagaggcatagtcatagatatcatctacccatgaccgcatgaggacattttgaatcctgaaccggtggtcggcattggtcgagaaggtcacagttccattttggtgggcgataaagtccgctatggcgggcgagtcaaagttaaaatcggactggcctaagagcctaaaggtatcgccagaccggctctcagctatccagctagacccgggtttaaggttaaattgggggggccggttggggtttcttctgtcatctttaaaaaccgcattgctacgaccatcaatctcagcctggcctccttcatggacggtaaaacgaaagacctgccgtctgaaatagatcccacggtcagcttcaatatttagttgcccccggacatcgataacaaaattatggtcgggattgttattgctagctcttaaaccgtccccagcagcagctaaattaaggctggaattcggaccaaccgtcaagttaaaattcgaattgccctcataattaatcgcatggccattattagactgcaaattcacagcggaattgttccctacctcaaaatcggtcggcccattgccattaaagctattatggaaggcatggctaccggacagaatcgaaagtctaacattgttgcccacaacgacccctttgggcttatcgcggacatttccttggtctaactgttcgagtccaatttgccccgattttatctgaacattagctccatcatgaaattcagcccttctaacccgggtaacaaatggtcggttaggaggcgtatatacatcgatattaccataaaagtggatagttgactcccaagaagtaaaaaggtgggcaccatcagctaactggttccggttaaaagtaacattctccaagtggaaattataggggttagcccgcatccgcaagaagccttgttcatcacctgagtggcgggtatagagattataaaagttgcagacgaccatatcatctatccgggtgtcggtatcaaaaccagcattctggttaatggttaggctaaagccttgaccatctaggatcttccgccgactgttggaagcaaccggcatattggaactagctccagaggaagtcgtaatatcccgacttagacggacaatttcaatattgggatcttccatggcccgtctcaattcagcaaagttagatacctctatagaccgagccgaactggaggtttggcccggtgcccggttggcattggaagctccactagcccgtgactggctaggagcctggtcttcttcctcatcctcttcgctggcgtcgtcggcttcctcatcttcagtgtcgtcgtccgcttcagcctcttcttccggttcaccgctaatttcgtcatcagcctcatcgccatcttctgcaccgtcatctgcttcagcttcttcttggtcagcttcaccagcttgggactctgattcttcggggtcttccccttcaccagcagttccatcctctgagtctggctcttcttgggcctggtcttcttcagtttcttcatcagaatcggactcatcctcgtcagcttggtcagactcggggtccgagtcctcatcttccaagtcaactaggccagtaaaatcaaagtcgccctcaaattctacccggtcaggggcctggtcttcagtaaagaccggacattcaatttcgttttcaccctgtttgactaagatttcatcctcttccgaaagggaaggaatggggtcaaattcaaattggccatcttcttctactaggacttcaaattcctggtcttggacctctaacgtaatgggttggtccggcaaggcttctccagacaggctttggtcacccactaaaggggggtctaagaaaaaatcaaaatcttgaccaatttggtcttgcccttgaattgcctggacgggccaagcaaggaggatagattggacgagcaagattaggctagcccctatttttacaagttttttcacgttgcccctccttcaacttacttggcttgcaatttacgcagtaggaaaacaatgaccaaaataaggatgagaactaagacaattgcaccaatggcaatagcagtccagttccagccatcgtcaagttcaactgcttgttcgtttaattcttccgattgaacttctgtaatggtaaagtcttgggaaaattcccaatcttcttcctcattggacaagttggcatggtaggtgtagtccccaggctgcaaaggctcctggttgaaaaggactggaaacttgaagacattattgggtccaatagaaaaattatccacttcacgctcatacaagacatcctcgctgccggtctgggtgacgtaagcgcggaagttaaccccttcaaccaagacaggggttttattagcaaattcagcatctaccccggtttggtagttaatcaagtctgcttccacccagttcaattctaattctgggtcgatttggtcaactgattttttatcagccccagcctggtcttggtcaccatcgtcttcttcagggtcagcttggacaatgttaaccccgacgacataggcatactcattttcaaagccgaccccagcttcttcatcttcagcttgaccgtcttcatcttcatcattgatcaggcggaagaaaatacccccaagaatttggccgtcaaagccttcttccgggatatccacatcgacaatggcccgcttggaatcctctgggccaatggtcatttcttcttcatagacccggctgatttcgtcaaaaggggcttccatgctttcatcgtattcgtcaatactgccgtcataggtgataatcccgttactgttgctggccccaaagttggtttccaccgcaacctttatctcctcattggaagagttaaagacctctacttctagggcctgagaagcaccgggttccatttcaatatcgaaataagacacctggtcattgacttggttgtcggggcaatagggcctggaccgaataaggaacggctcgaccttcatcttgcccataaacagttgtggcaaaaaaggccaacaagcttgataagacaagtaagagcgataatattttcttcttcataaattacaaacccctatggttaaataaaaacatctctacttaaatagagacgtttttacctaaaatgtattctgccttattgaccaggtgcatcagttaaggtccaagtcaaggttgaagtgtggctacctggtgtagcaacagcttgtggaacagttaatgcaacttttgagttagtatctgctccctcttctttcaaccaacgtgtaacccatgagccgagaccttgacctggtatagcaagaccttgacctggtctagcagtagtaacttgtgttgcatcaccaccggtattaaccacaataggatcagcaacatcaggtgctaaaagtgagctaagtcttgaaacagcttccccatcggtaaaggttaatttagcgccagggaggctttcttgaagacctgatcccccagtagagaatgatgatgcttgaacagtcaagttccagcctgctccagtaccacgacggtcagtaacttggacaaatggtttcgggtctatcgcttcataagtttcctctgcgactgaaagttcgtgggtaccaaagtccaaatttggaacataatccagagttaatgaacctgtttggccggtaccgctttggtcatcattgtcttgacctggattttcagggtcaataattgtaggtggctcttctacagagaaacgaattgtagcttcagaatcttctggagccggtgctgcatcaacggttgtgcctaatactggcaataaaactaagcccgctaacaggctcccctttacaaaggtttcaatttcattcaaaacctctcccttttacaaatcctttaaataacaatagttgacctgattatatcgaaactaatctagcaaatcaatagcttataataatttttaataattaatttttttgttttaaacacaagggttttaaatagttagagttcatggtcgactacttattactcagcatttctttttaaatgccggtgtccttctcaccatgcttgactgtagaaaaactattttattcccggtcaacttccatctgagtgataaaatcagcctgattttatcattcaagcctttcgactaaaagtcatttctcaccttttcaggtagaacttctagggttaaccacaagtcttccaccaaaccaaaacaatcccaccctatctcaacggaagcgggtgggactgtcatctttaagtttttaactttctttctttttcaaagtgttgccgggcctggtcatagtgttggtagaggaggacaaagccggtgaacttggtcgactcccatggcttgtcccggccgcagaagtggaggatggctgtgttttgtgccgtccactcgggagtgtattcttgttcgctttttaggtcaaggtaaatctatcccctctatttaggcaatccaacaagcccaaatactcgtctttaacctgtcccactacattaaccttctcatgagcaggcaggtctctatttaaaatttgaagttccccagtataacgaccgtacttattattatccatggtaatacaacccttatttcgcactttagtattttgaggctgggttaagaaagattcccagttaatttgcctagacccttgtactctgaccaatttttctggtgagtcgatgcgcactgaatagtctcgattttttatagcttcatagtcatgatttaaaacgactggcacttggattaattcatcctcaatatagcttaaaataagttccagctgtttttccgatatgagaccatccccgacaaacacactatcacattgatggtttttgattaaatctaaaaattgaacatatggcgggagatagcggtgatcttctatgcttggtaatccttcctgaattggacctcttttttccagatctccactcataaaggctaagctatgtccaccattatttttaattgcagcattcagactgttcaaatagcttttatccagtcctgtttctggccttggataaaaattatgcatatagtaagctcctgcttggacttcgctcgtatctataagagtggaagcattgaaagtaaggtctacatcttcttggagttctactgaatttatagaatcaaacccaaagtctaaacgaagattatctatttttagaagttccaccagctgtttaagatcccttactttaaatctttttaaactgactggagatacatctgcaatgatataaaattgattttcggttaaccaacgacacatttctatcgtttttgtcacataagatgggctaaactcttcttctatgtgtaaggatataaagattggaatgtttttcccttttaatttatttaaaataggtttttgtttttcaaatgaagataggtaaaccgataagccaaaagagctaaacattggccaggtcacttcccttaataaacaaccgtgtaataatgaagcttgctaaataagatattaataaaccaattgcataatggatcatgccattttgcattaagggcagagctacccaaccagatggcccccaagcgcttgaagctactcccatcaacattacataagctcctccaaaaccagcacctaatccggcagtaataaatggtttgccaagtggtagagtaactccgtaaatcaagggttcgccaataccaagaatacctgctggtagggcccccgtaataatacctttcattttttcatctcctacctttctagccaaggtgtatatggctagagctgctcctacttggcctgctcctgccatggctaatactggaaagagagtgactcctcctaatacttcaagttgtatggcataaatagggatcaatccatggtgaagaccaagtaaaaccataggaaggaaaactgctgctaaaatatacccagataaaatactaataactgtattgtccgaccctataatataactaagaccggttaccaaccaatctgataggacacctgaaagaggcataatgataaaggccatgacgactatggtgattaaaagtgtaataaccggggtaaccattatatccaaaacgtcgggcatgcgtttgcgtacagctttttctataacagacaaaagccaaacccctataattacccctattataccaccttttccagtagttaaagttgaattgaggggttcttcggcatcatagaggttaaacaattgcgatagttcaattaactgtggtgctattgatgcggcaccaaccataccacctaaggcctcagttgccccaaattctttagcagcattaacaccagtaaaaattgcaaagtaacctaagaaactattccctatcaaagcaaaagttatttgtaaggcgttccaaaatgtcccatcaagtgttccttccgctatcatagttcctaacaagctagaaaaaccttggaaaagaccagcagctatgatggcagggatcatcgggataaaaatattggcaatggtttctagagctatccttactttgcctctattttgttgacgctttatatcctgcttattctcttcccaagtattgtctggtgtcttgctttcttttttaaagccataatcttccactaacaaatcagctaatttttttgcttttcccggcccgaccacaatttgtaagttatcagcatgtacaactcccaatacaccgtctatattttccaattgagtctgatcaactagatcttcatcttttatgccaagtcgaagacgtgtcatacaattgttaatggattgtatgttttcttttcctcccaccgcatctaagatttcttttaagataacatcgttctggttggccattttaatttcctcccttttatttttcttttattgcctcacttattttgccgtgtacctcatctaacttctcacaagcttggaccggatcaatatccaataagatcatcagaatagctacttttactgagccttgactagcttgtaacgcttgttgggccaaatcttcttccacaccggtggcagcgatcacaatattttgagcccgagttttcaacttatcgttagattggagtacatctaccatgaggttctgatagactttccccacttgaaccatcgttacagtggaaatcatatttaaaatcatcttttgtgcagttcccgcctttaaccgagtagacccagttaaaatctcggggccagaatcagcttcaatagccacatctgctagtctgcctattttgctagccttgttacatgctatagcaatagttgctaccccaattttattagcatattcaataccaccaactacatagggtgttcgaccactagcagctaagcctaccaaaacgtccttttttgataatttaatctgctttaaatcgtttgccccatcactaaagctatcttccgcaccttctatgggttgactaatagctttttgaccccctgcaattaaagcaatgaccttatcctgagatactccaaaggtcggcgggcattcagaagcatctaaaatacccaaacgaccacttgtccctgctcccatatatatcagtcgcccgccctccttatatttttgagtcacaatttgaactgcctggcttatttcaggcaagactttttcgatcgcttgagcaacttttttatcctcttcattcataactcgcaaggcctcgattatactcatccgatctaggtttgaagtgtttggattgcgcttttcagtcgttaattgatggatttcttccacaatattcactccttgtcaatttgagttctggttaattgttcaagacttttatcgtaaatctggtttatatagcctaaatacaaaatatctatgatatttaattgggccatgcgggaagaaatggctgcactcagtcaagtccaaatctatgtgtaaattctacaatatagtaacaggtgttatacggcggggctttttctttttccgtcggtcggcgtgatcggctaaacacaccgtttggcgagcggaaagagtgggcttctcttgaagcgagccagcggtgtgttagattacgccaagtgaccgagggaaaaagccccttttccagagggaggcaggttttaaaaggggtttaaaaagttcagcctatcgtaaaaatcgatagttctgagcttcccaattctcctgcaggtttaataagaccgagccggctagccgctctgcggatttgatattggggaaaatccccaccactctttcccgacgtcgaatttcacgattgactcgttcgatggaattggttgttctcaaagacatatggtaaggagaaggctccatttgatactgaatggcatcttcaaagccctcatctaatagactcaaagctttggccagcttcgcttggtcttcgaactccgcctccaaagcctgtttccgttcacgggcttcctgctgggttctggaaaataaaactgcttggaaacgatctcggatcactcggtccgtggttttcggcaaggcatcggtgatattgcttaataagtgaaaggtacagcgttgccaagtggtgttgacaaaacattcttgaatagctttccgtaagcctgcatgggcatctgaaatcaccattttcggcgtatcaatgcctctggcttttaaatcaagaaagaacgaccgccaactttccgttgactcttgcccagccactttaaacccgatgatttctcgcctattctcatcattgactccttgggcgatgtaaagggctttggacaccacccggttatcctctcggacctttatatacatggcatcgacatagatataccggaaatcagtatgggtgagggaccgcttttgaaagtgaaagacatccttgtccaggtgtttattgacatcggagacaaacgatttggagaccttttgaccacaaagggattcgacgactttcgtcattttgcgggtggagatgccattgacgtacatctcaaagatggtagccaataggccttgatccatccgctgattgagttcaaataattgggtatggaagtcgcctgaccgcgttctgggtacgttgagtttgagggtgccgattttcgtggtgaaatctcgctcataatacccattgcggtaatcgcagcgatcttcatctcgctcgtaccgcttgcttttcatatattggtcgcgttcggattccatataagcgtttaagaccgtcactaaggtggatttcatcacttgatccagatcacaatttaaaattgcgtctgttaatttattggcgtctagtgtaagattgagttgagtcataatgatcttcctttcaatgtgttttttgttttctctaactacattgtagctcaaaaaggtcattatgactttttctttttacacaattatatggactttatcctgcactccttatggttagctcattatttggtatatagatattagtatcagccatatcagataaggggctcgcaccaattttagttatagcgataaccttagttcctgttgttttaacttccttaacgcaatcaattacttccctggtttttcctgaataagagatagctatggctaaatcctgagcttttacgtttcgagcatgaagaagttgagtatgccagtcatcactagttagggctaacttatcaacccgattaaattttaagcaagcatctcgagcaactaaaagtgaagcccccataccgaataaaacaattttttcacacttatttatttcatcaacacattccgcaatgacctttggatctagtaatttttgagtttcttccaaagtcagaatatttttatatgtaattttgcttattgtatcctgtatctcatcattttggtccataattgtcagataggagtcatagtaatcttttcgttgagcctgctcataaatcaaactttttataaagtctttataccccctataaccaatcttcttacacaaacggataatggaagaaggcgaagtataagtggctgaagctagtttatggatgctcatctgacttgtttcacctggatggttcaatatgaaatgaataatgaccttctctgtcgaggtagcattttgcatataatcctttaacttaatgctggctatagtcataaaaatcctcttttcataatcactttatcactgttgaacaattattcaataaaacgtttacattttggtacattgtatcatcctatggctcaaaacaagctttttatcccttcttgatgataaaaaccttcccctaatcaaaacaatcccaccctatctcaacggaagcgggtgggactgtcatctttaagtttttaactttctttctttttcaaaatgttgccgggcctggtcatagtgctggtagaggaggacaaaaccagtaaacttggtcgactcccatggcttgtcccggccacaaaagtggaggatggcggtgttttgcgccgtccactcgggggtgtattcttggtcgctttttaggtaatagcgggtgtacttgcgggtatcgtagttccatttttcttcggccaatagcttggtgtgcttgccgtaaaggtggttgaagatgtcttggtcgggcaagagcagaagcttgtcgaacttgttgacggcagcaaagatttcatccgggtcaacgacctggcgggcccggtccaaatccatcaggataaccccagtattgaaataatcattttccgtctgcaaacggactcggttaattccgcccaccatatctgtaaagcccttgtgggaggctgccgcaaagcaattacccgccaagtcggtatgccaaagctcttcaatccggttaatcaccaaaatatctgggtccaagtagagaacccggctcaaatcagctggcaaaataaaaggtgctagtagtctaaaatacatttcgcgggggtagcggttggtgacagcagcattttgaaaatcctggtccttgaccttaatggcctgaaagtcagctcccaggtcttggcagtatgatcggatttcttcaagggctgcctcgctaacctgttggtgtaatagccatagtttaaaagcttggtctggattattttggatgagggagtaaaacatggtcttaaagggtgggatataattttcatcaaaagaaaccaggaccgagatagcctgctgggacataccatcttcctttcattctaggattttcctgagtcaaaatgtcaaagccaagttctaatcgttactctatcttagcatagaacaaaccaaaaccctatgaaaaaatggggcttcagtagcttttacccaagccattttaactgaccaaaaaccccaatcccaactgacactttcctagctttgacttccttccaatacaatttcccctttttgtagctgacccgtatgcaagtaggtaaaagtgcatgatcttaaccacaaatacccatttttgcatctttcatgtttgggtcattctacctatactataattagaaatcaagggagatggaggtcttggaattatcactccttcaacccccccctgatcaacaggcaggtgatgcaaataggtacaatcgaaattgtcttattagctattgcaatatcactagatgtttttgctgccatggtgatccaaggttccatgctctcacgcattaactaccttaacttacttaaagttggtattctctttggatcttggcagactgtgactgttggtctgagtaatgtcattactggtcgattgatcgactatggaatacccattgatcaaagggcagtccaagacatcctcttgatttttgcaataggaatatttaccattttgggtttgtttatgatctggaagtaccgccacaaggacaccatacttgagcgaagggtcgaccaactgagtatgaccaagatcctatctttggcggtgatcaccagcatcgatgccatcctagtcggcatgggactgggggccttggatgtttcaatttttgaaatcctcctcccctttatcatctttagtatcctagccgtcttcttaggtatctatgtcggccactggtttggctttgaagaaaaaccagtcgcccactatgttgctgggaccatcttcttggtcatcagcgtcgacctactcttcagattggtaagtatctagtcgaccaattaggaggtggaataaatggaagatagcggactaagcaatacggccggattatggatcggttggatcggtattattatcggtgtgatcggcttcttctggcaaccagtgtggttgggaattatcgctttagttttaggtattatcaatttattctccccacaaaaagcccttgcttgggtagccatcgcaatcggggctattgccttgattatcgccatggtctgacaagtttaggctaagacagatgatgactttgtaagttcgaaccacaatgctttaggaggcgtttgtatgtcacaagaaccaggaaacacaaaccaagcacctaataacaacagtggactaagtgatacagcaggcttatggctcggttggatcgggattatcgtcggtgttatcggctttttctggcaaccaatctggctcggtattattgctgctgtccttggtatcataggactcttctctccacaaaaaggtgtcaactgggccgctattataatcggtgtgatcgccctcataatcggcctggtctgataaactcatttgctaactccttataaatatttaaccggcttcaagccttcaagggacctgtctcagtcccttgggggcttgaagtttttttgcagataaacaaactagtcttatttatttattatacaattgactgatcaactttgcttaagcttaatattcttctatttaccaagtggttttcgtgttaaaaagagccgcataatgttaaaatgaggttaagaacggatacaaggcaggtggtttttttggccgaggagagaaatacccaagacttactggtcgctagcttcaagtccctgatgatgaagatcccctttaaaaaaatcaccatcaaaaaaataacagatggtgctggtgtcatccgcccaactttttacaactacttctccgacaagtttatgatctttgaacaaatcttggaccaggaattgttcaagaccctctactccttggttgaaattaacatggtcaccgaaatcatcccggttatctttgcctacttcaataaaaacaaagacttctacaaaaaggccttcaacatcgaaggacagcccaacttcattagcatcttatcagataagatcgagacctttgccatctacctcctccaagaacttcccctccaagatgaggaggccattcaaaccctgggcatggaaaatgtggccaagttctacactaatggcctagtccaggtcctctaccactactgccacaacctcaacgatgactatgatatcgacttttacatccatgcttatacttatttggccagccactccctgactgatatttttgaaatccccttggaataagactggtaagccactaattgaatcgagtaggagactagccattaattggctagtcgacctctcacaccaccgtgcgtacggttccgtacacggcggttcaatatcttgcgtaagcagactcagcgatagtgcttagtggaactaagccccacttgctgagtctttctgttgttattgcacgatgaaattcatgtgtgcatgacagtcgccagtactttttgcgtgaatacgcaatccgtttggctgaatctaagtccagtccatattgttccaactttggtataatagttcgtggacgtttccaccgtttaagaatcagctgtctgatacggtgatttaaccattgctcaacttctttgataaagcttttaatgaagcctaaaccaaagtaattaatccaaccgcgggtgactcgattaatttcagtcattatctttttaaaagtacctggccgtttacgactggtcagctttctcaatctgcgtttgaatttctgcttggcttctttggtagggataaaacgataatccccattcacttgcttcatcagacagctcaaaaactttaaacgggcaggagacccaacctggcttttgtcttgattgacgattaactttaagtctttttcaataaagcgtgtgatgctgttcattacccgttcaccggctcgttttgatttaacgtagatgacaaagtcatctgcgtatcggacaaatcggtgaccacggttaaccaactctttatccagttcatgtaagtacacattactcaaaagcggtgatagaacaccaccttgtggtgcccctgtttcacttgcgataaattcgctagtcaaatcaattacacccgctctcaaaaacttacggataattttcagtatcattttatcttggatgtactgttcaagataatagataagtttgtcgtgattgagcgtgtcaaagcattgtttgaggtcacaatcaactacaacacgatagccttctttataatactgtgcacattgcttgagagcactgtgcgtgcttttccctggtcggaatccgtgactgttgtcatagaagtgcgggtctataatcggttcaattacttgccgtatggcttgttgaacaactctatcccgcacacaaggtatacctaactttcgtttttctccattcggctttggtatttctactcgtttaactggttgaggcttatacgttccatcaagtaatttcttccgtaagggttgataatacgcttgaatgtgctcctctatctcaaaaacggtcataccgtcaatacctgcagcgcctttgttccgtttaacggctttggctgctgtttccaagtttcttctgtcaacaacttgctccattaagtttggagacttacgatacatttctgtcatttcacctaaagtttactagacgcatcggcttaccctttcggttccacctattctctccaccgattgccaatctcttcgattgttttctgtcctattcgtaaactttaacctccgttctatactttgtatgaatattgttcagtccttcgctacaacgtagctactatgacctcggctgacttctcactattcgttgttactactaaacgctagtgagacctccccgagtaaggtgtgacaaccttccactcatgtcactgcttcatttactgaaagggacttgtgcagtattggactttactttgttatgcaagctcatccatcccaaatcagccttgatatgaagtttctgttcgtcagtgcgagtgtttgcctccagcttccttcagattccacctcacgatggacacccttgccttcagctaacagttcctactgccaggcctgcaatggactttcaccaccaagttgtcacccatgccgggcgcacatacagaaaccccctggcccattgtcttggaccagggggttttttcttatctttttaaatttaagcctttattaagcttctaagaagtcatctgcttcataggctgggttagggtaggtgtagaagcctttaccagctgctcgacctgtttcacccttgtcaattttgtcattcaagaggtctaagatctggcttagtttttcaacttcttcttcatcgccagcttcttcagccttgtctttgttaaggtcaataatatttttcatggtttctaaaccaaccgtgtcaatagaagcgaaaggtcctttgtcacgtttgtagcctagaatccaagtccggtcaatagtctcaaggtcagctgcaccagttgccaagaggtctaaggcattggtcaagtaaggaatgaggatggagttgacaatgtagccatctttttccttgtggaggggtagaaccaacagaccaatatctctggcaaaggcttggagtttgtcaaagaattcatctgacgtcttggttcctggcatgacttcaccactgttattcttccaaattcggttggcaaagtggagggcagcaaatttctctggtcggtcagtcatcccttccaaatcgcttggtagcaaggtggaagtgttggttgcgatataagcttcctctggcaagacttcagccaagtcaccgtagaaggattctttgatgtcagggttttcagacactgcttcaatgactaagtccacatcggaagcagcttctttaatgtctgaggtcaaagtaattcggtccaggtattcattggcctggtcttttgaaacatccatgtcttcagcatattccttggcaatcccttctagggtttccttaccattttcgatcgcttcttcatcaatatcgtaaagaacaacgtcaaagccaccgctagcagtcaggtaagcaatctgggaccctaagacaccagctccagccaccatgacttttttaaagtcgtgtttgaggtcttggatttctttcggattttcaaagaagtcgtctgcttcaaaagctggattagggtattcatagaaacctttgccgtcaaacttaccagattcgcccttgtcaattttgtcttgagcaaagtcgataaagtctttccgccaatcttccttggtttcttcataaatggccttcatttgttcaagcggagtgcctaagccaataatatcaatcatggcaaatggacccattggggagtcatggcccttcatccaagtcttgtcaatcacttctggttcagcaattccattagcattgagttctattcctgcgcgaagaagggggattaataagttatttaagacatatccagctttttcaaagttgagttcgatcggggtcatgtgaatgtcacgggcaaactgtttaactgtttcgtaaacttctgaatcagtgtcttcagtccccatcacttctgccatgggacggtcccagatttcattggcaaagtggagagccaagaacttatccgtccgaccagtggcatccttgaagtcacttggcaagagggcagaactgttggtcgcaaatatggtatcttctttcgcaaccttgttcaagtccgagtaaaagtcttttttgacatctatattttccgcaatagcttcaactaccaagtcagcttcagaagcagcttcttccaagtcggttgtgatggtaatcccatcgaccacttctttcagtttagcttcatcaatacccaagtcttcctggtagcgaggaataaggtcttttagcttaccacgagctgcttctgctgcatcctcatcaatatcatacaaggtgacattaaagcctgaagctgcggtttggaaggcaatctgcgaacctaaaacgccaccgccagcaatcgttacctgtttaatcaaaaaacatctccctttcgttttcctattctgatagagtaagatttctgaaacattcaccaagataagagaaggggtgaaaatatcttgcctaactttgtgaacctctctcttaccttgttaatttcattatagtgataactaggagatataacaatctttaagcttgtgaaaagatctcaatattaaactgtcagcaatcctacttcgccctgtcgttctagtatttgatttatgaatattttttgaactatttaagtaaaagagaagaagctaattgaatatttttcacaatcatacttttctagcttatacactatttagtattatctaaacctatcaaattgcacaagcaactaaaacaaacatcgagtaggagactagccattaattggctagtcgacctctcacaccaccgtgcgtacggttccgtacacggcggttcaatatcttgcgtaagcagactcagcgatagtgcttagtggaactaagccccacttgctgagtctttctgttgttattgcacgatgaaattcatgtgtgcatgacagtcgccagtactttttgcgtgaatacgcaatccgtttggctgaatctaagtccagtccatattgttccaactttggtataatagttcgtggacgtttccaccgtttaagaatcagctgtctgatacggtgatttaaccattgctcaacttctttgataaaacttttaatgaagcctaaaccaaagtaattaatccaaccgcgggtgactcgattaatttcagtcattatctttttaaaagtacctggccgtttacgactggtcagctttctcaatctgcgtttgaatttctgcttggcttctttggtggggataaaacgataatccccattcacttgcttcatcagacagctcaaaaactttaaacgggtaggagacccaacctggcttttgtcttgattgacgattaactttaagtctttttcaataaagcgtgtgatgctgttcattacccgttcaccggctcgttttgatttaacgtagatgacaaagtcatctgcgtatcggacaaatcgatgaccacggttaaccaactctttatccagttcatgtaagtacacattactcaaaagcggtgatagaacaccaccttgtggtgcccctgtttcacttgcgataaattcgctagtcaaatcaattacacccgctctcaaaaacttacggataattttcagtatcattttatcttggatgtactgttcaagataatagataagtttgtcgtgattgagcgtgtcaaagcattgtttgaggtcacaatcaactacaacacgatagccttctttataatactgtgcacattgtttgagagcactgtgcgtgcttttccctggtcggaatccgtgactgttgtcatagaagtgcgggtctataatcggttcaattacttgccgtatggcttgttgaacaactctatcccgcacacaaggtatacctaactttcgtttttctccattcggctttggtatttctactcgtttaactggttgaggcttatacgttccatcaagtaatttcttccgtaagggttgataatacgcttgaatgtgctcctctatctcaaaaacggtcataccgtcaatacctgcagcgcctttgttccgtttaacggctttggctgctgtttccaagtttcttctgtcaacaacttgctccattaagtttggagacttacgatacatttctgtcatttcacctaaagtttactagacgcatcggcttaccctttcggttccacctattctctccaccgattgccaatctcttcgattgttttctgtcctattcgtaaactttaacctccgttctatactttgtatgaatattgttcagtccttcgctacaacgtagctactatgacctcggctgacttctcactattcgttgttactactaaacgctagtgagacctccccgagtaaggtgtgacaaccttccactcatgtcactgcttcatttactgaaagggacttgtgcagtattggactttactttgttatgcaagctcatccatctcaaatcagccttgatatgaagtttctgttcgtcagtgcgagtgtttgcctccagcttccttcagattccacctcacgatggacacccttgccttcagctaacagttcctactgccaggcctgcagtggactttcaccaccaagttgtcacccatgccgggcgcacatagaaaaagactgaagaggagatttcacctcttcagtcttttgtctggtctttatcaaaaatattattgggcagtgtagccaccgtcaactagcaaggttgtgccgttcacatagcttgcatcgtcactagccaagaataaaacgactttggcaatttcttctgcagttcccaagcgaccttgtgggtggagggcttgtaattctttaagggtttcctcgtccacctcatccaaaagggctgttctgacatagcccgggcagacagcattaacccgaacacccttgtcagcataggctgtacaaatgttttgggttagtaacttaactccacccttggctgcagagtaggcagttgggttaggtagggagacaaaactgtggatagacccggtattaacaataaccccgccggaatcttgttttaagaattgtttaatagcatatttgtctgacaagaagacaccagataggttggtatcgatggtttttttccagtcatcataggataggtctgcagcttcgccgtctttcgcaattccggcattagcaaacataatgtccaattgaccaaagcggtcgactgtttggtcaaccaagttgataatatcatcttctactgtcacgtcagttttaacaaaaagggcctcatgacctgattcattaatcttgtcagccaggtctttcccttgttcgccaatatcagcgattacaactttagccccttctttgacgaattcttcaactgttgcttccccaataccactagctccaccagtaataatggctactttattgtctaaacgtcccattaaataagcctccttgaagtgtcttattttcaatctgctgacggcaacaaccgtccccttaactgtagttctataggagctagtacttggaaaagtcaaaggttatccctatttctctgacaggagacctagctaaatatcctataaaacctcagttaccggttaatcttattgtatccaaatgaaaaacatagcacaagtaaaacgcttcactaaagaaatgtaaattaattgtaaacaaagctggcatcctgctataatcagattgttttattgtgtttaatatcacaatttaggataacttaaaaactaggcatctgaaaagtcactatctaagcccaaatcaaaaccgccagcttcaaggaaactgggggtttgagtagtggataccttcatttaggcttttaaaaagtcttcggactggtaagctgggtcaggataggtgtagaagcctttgccatcagcagccccgctttcgcctttatcgattttttcttgtaagaggtcgatgatccgtccaagcgactctttctcctggtcgtcttctgcttgatctaatctaagttcggcaatgtccttagttgtttgtagacccacccggtcaatcgtagcaaaaggtcctctgtcttcatcataaccaatcatccaagttcggtcgatggtctccaagtcagcagcaccagatgctagcaagtctaaagcactcagcaagtggggcgtcagcatggagttaatcaaataaccagctttttcttttcggagaggaaggacaaggaggtgaatatctcgggcaaaagcttgcaattgatcgaaaaattcatcagaagtttgtgttcccggcatgacctcgccagtattttgtttccagatctggttggcaaagtgaagagctgcaaatttttctggccggtcagtcattccttcgagatcagacggtaggagggttgaggtattggttgcaatacctgttttatccggaataacttgacaaaggtcactgtagaaggattctttgacatcaggattttccgaaacagcttcaataaccaagtctacatcgtctgctgcctcttcaatatcagaagttagcttaatttgatttaaatagtcattcgcttggtcttgggaaacacccatgtcttcagcgtaatcttttgcactagcttctaatttttccttaccagcttccaaagcatcctcagaaatatcatataagacaacatcgaagccaccagttgctgtttggtaggcaatttgagagccaaggacaccggcacctgctaccagtacctttttaatatcatgtttaaggtcttggatttcctgccggttttcaaagaattcttcttgttcaaaagccggattggggtagtcataaaatcctttcccatcctgcttaccggactcacctttatcgattttgtcttgtgcaaagtcgataaaagtcttgtgccagtcttcgccactttcttcgtaaagacttttggcttgctcaagtggtgtggccaagcctacaatgtctaacattccaaagggtcctaaggaagaattgtggcctcttaaccaaactcgatcaatgtcttcatacttagcaatttctttcgaaaatagttctcttgctgatcttaataccgggatcaagagagtgtttaaaacataaccagctttttcaaagttcagttcagtcggcaccataccaatatctctagcaaattgcttgactgtttcatagacttcagagttagtatccttcgtccccatcacttcagccatgttacggtcccaaatttcattggcaaagtggagggctaagaatttgtcagtccggccagtagcatccttgaagtcacttggcaagagggcagaactattggtagcaaaaatcgtatcttcttttgctagttcatttaaatccgagtaaaaatcttttttaatgtctaggttctctgcaattgcttcgacgaccaagtcggcatcctgggcagcttccttcaagtcagtcgtaattttgatactgtctgctgctttttggaggtcgtcctcatctaaacctaaatcttcaacataacgggggatgtaagcttcaattttcttccgagcggctttggcagcctcctcatcaatatcataaagagtcacatcaaaatcgtgtacagctgattgaaatgcaatttgacttccgagtactccgccgcctgctaccataacattcttaaccaatataaacactccttaagtcctttaatcttactaactggctctcgatcattctgacttaaataattactagctttgttggcgaattgatcttgggactcctttcttagctcgacttgtgaaattgacttattagttattaaattcattatattaaaacggttgattattatcaagtgaaataaattgactctataagtaccgacaaataaataattttattttaatttcacaatcgattgttattaattttatttatattaaacttcacatagtcaaagaaatttatcccacatcaaaaccgccagctctcttgaactggcggttttgattgatattaatagtcttagctagtgtaataaagcaagtggtccaagttattgatttggatatcggccctggtcttctgggtaataagccctttctcttctaattctttaaattttcggctgatggtttcagacctagtccccaaataggaggccaagtctttccgggacatgggcagtttgaccaccgggctttcactatcattgtcgaccaggtctagtagaaacatggcgagggcttgtccaactttttctgtccccacctgactggtttgtttataggagtcgtctaggcgtttggacataatttcgataattttgagggaaatttctggatgatcaagtatgattcggtctaaatctgccttgtggatggtacaaatcctagaatccaccaaggcttgggcataatcgtcatggacagtctcttccataaagacatgactttccccaataaaatcacctggacccagtatctgaaccacctgttcccggccattgtgcaagaggcggtaaactttaagacctcccctgtggacgacataaagagcgtcagtccggtcgccagctttgaacaaggattggcccttggaaatagtcttgtggtagaccttcttggatataattgccaaggaggcgtcatccaggtggttaaaaataggcactgaatttaggcaggtttgctggtggttggccatggtctccctcctcttccatgatggtctggcagtagttcaacttattggtctttagcactggattttaaaacttggtaacccaaagactcaattttatttgcgacagcttcaagggaagtctcctcttcgtctagttttaacttgaccttgctagcattgaagagtactttgacactgtccttgtcaacaccttgaacatccttgactctggcttcaatcttttgctgacaagaagggcaggtcaagtcttccagttttaaagtagcgatttgcatgtttactctctcctttattttacacttcatctatcttctgcttcaagttggacttattagtattccgtctcaattggtcagcttgttttaagtcttggtaaaccttgctaaaagcttgacaagcatcctcgggcaagtcgtaatgtcccgtcacttgagctaattgttcaaattcttggtctaattcagcctctccctggtctatcttagcttgcatagtcaagtaaatttgccgtacttgaaagacttctggatgggcctgaccgtgtaccttggtaatggccttagtataagtgtctaattcatcttttttatctttgagaaatgcagttagcttgtccatcttcctcctcctttcaccattatcttagccctaaatggctatctttaaattgataggagtcaagtttttcatttaatcctaaatgaagacaaataatcaggcaaaaccacttcaaactacttgtttttgtaagctaacaagcggatagcattaaaaataacaagcaagatactcccttcatggaccagcatccccaaagacatactcatccagggagtccacaagagcatagccactaaaaccaccacaaccgagatagctatcgcgatattctgcttcatattccggctggtagcttggctgagccccaaggcatgggtcaaatggtcaaaatctgattggaccaaaaccaagtcagaggtatccatagctgtatccgttcctgaccccatggcaatgccgatgtcagcttgggctagggaggggctgtcgttgataccgtccccaataaaggctaacttgtgtcctgattcttgcaagtccttgaccaaattcaccttatcttctggaagcatccccccaatggcttggtctaaaccgaggctttgactgacccggtcgacggttttttggttgtcaccggaggccaggaccatggtatcgatcccatgctggcgtaattgtgccaagtgaccttggaggccgggccggatttggtcacggatgcccatcagacttttcacttgcccgtcaacagctgtgagaacgatggagtttcctttttcttggtaggccaaactagcttgacggaccgattcggagattgggatagctaatttttccatcaggtagaggttgccacaagccactgcaattcctcctacttgtcctgtaatcccgccacccttgatgacctggatgtcgacagcttctttcaaactgcttgggctggggtctcccagataagcaaggatggctttggctagagggtggtctgattcctgttccaaactagccaagtagcttagggcttggtcaaggtcttcactaaaatactgggcatcggtaacttgagcttggcccagggtcaaagtccctgttttgtcaaaaaccatggtgtcaactccagcgaaagtttgaatcgactcagacccctttaagagaacaccctgtttagctccattaccgatccctgccacattcgacaccgggaccccgatgaccaatgctccaggacagccaagcaccaaaatggtaacggccaattctatatcttgactaaaaagtcccaccaaaatgccaagcaagaggacgccaggagtgtaatatttggcaaatttatcgataaacttttcagttgaagacttggcatcctgggcttcctcaactaggctaataatccggccgaatgtcgtgtcttcaccaaccttgtcagcttgtacttgaagactgccattttccagtatagtcccagccctagcttgatcgccctggcttttatggacaggacttgattctccgctaatagcagcttcattcaagtagccttccccctttactacagtcccgtcaactgccaatttgccccctgttttaaccaagaccacatccccttcatctagcaagtctacatccctttcttgaaaggacccgtcttcttctttgaccagggctgtttctggggccatctgacttaggcccttgatggaggaccgggtataggccagggtcttgccttctaaccaggaaccaaagaggaaaagaaaggtcaccacggccgcttcttccacattcccaatggccatagccccgatggccgctatagagactaagacctcaatcgaaaccactttaacttttaaagcttccagggcctggaccaggatgggcaaagtccccaggatgcctgctagggcaaaagtccaaaaataagtggaccttgattgccagacaaactttccgatgatgccgacaataagtaaaataacttgaccgaccataatctgatttttatggcccagtagccagatcttaactttttgcatgattaacctcctatagtaacattgctgtatcttttgatactttaatcttacataggatcacttgacccctcattgacagtggtcaagtttagctagtcaagtttttctcccctaacaagtgccaatcctaagggactgcaaataaaaaacccccacttatcatccaataagtggaggttcatcagtttaagcttcctctatagctaggccaatctaggcttttaagaaggcatcttgttcaaaggctgggtcagggtaggtgtagaaacctttgccagatcccataccgccttcgtttttatctattttttcatttaagaggtctaggattttttgaagtttttgaccttcttcactgtcgccagccttgtctcttcttatgctgataatgtttttaaccgtttctaggccaattcggtcaatcttagcgaaaggtccacggtcgacttgctggctgatcatccaggtcttatcaaccgtttcaacttcagccgcaccactagcaaccaagtccaaggctgcgataaggtgtgggatcaagatggagtttaggatatagccatctttttcctttttaagcggtaggactaataggtggatgtcccgggcaaaggccaagagtttgtcaaagaactcatcagaagtttggctaccgggcatgacttcaccggtgttgtttttccaaattcggttagcgaagtgaagggaagcaaatttttctggccggtcagtcattccttctaggtcacttggaaggagggaggaagtgttggttgcaatataagctttgtctggcaagacttcagtcaagtcaccgtagaatgaccgtttgatgtcagggttttcggagaccgcttcaatgaccaagtctacatcgtctgccgcctctttgatatcagtggttaggctgatcttgtccaaatacttgtctgcttggtcttgggacacgtccatgtctcctgcatattgtttggcaatgtcttccagtctttccttgccactgtcaatagcatcttggtcgatatcgtacaagaccacttggaagtcgcctgtggcagtcaagtaggcaatttgtgaaccaaggacaccggcacctgctaccagaacttttttaaagccgtgtttgagttctttaatatcttcagggttgttgaagaaatcatctgactcaaaagctgggttagggtagtcgtagaagcctttgccgtcttgtttaccagtttggcctttttcaactttttcttcagcttcctcgatgtagcctttcaaccagtcttgttggttgctttggtattttgttttagaaatttctaggtctgtccgtaagcctatcatgtctaagataccaaatggacctaagccattgcccccagccttcatccaagttttgtcgataacatcaactgttgcaatgcctttacctaagagttccttagcagcatctaagatagggataaggagggagttgaggacataacctgctttttcgaagtttaattcgatcggcaccatatgaatgtcttgggcaaattgtttaacggtttgataaacttctgggtcagtatcttctgttcccattacttcggcaatattccgtttccagatttcattggcaaagtggatggcaagaaacttgtctttacggcctgtagcatctttaaagtcacttggtaggagggaggagctgttggtcgcaaaaatagtgtctgggccagctgcttcattcaagtcagaatagaagtctcttttaatgtcaaggttttcggcaatggcttcaatcaccaaatcagcatcctgggctgcttctttcaagttagtggtgtaagttatattgtccgcaattttcttcaattcatcttcgtctttgcccaaatctgcaacatagcttgggatgaagttgtcgatttttttgcgggctgatttggcagcattctcatcaatgtcataaacggttacattaaagccggaaacagcggtctggaaggcaatctgcgaacctaaaacgccaccgcctgcaatcgttacattcttaaccaaaataaaacatctccttgcatcttattttttattatttttgccaataactgggcagaatgaaatcgtttgcattcatgaaacaaaatcagactacccactaccaggctgtctctcaagcctcggtcaataatattatacatttttcacaaagataggacaagttaaatccctcaaagcaaaaaaggctacccgactgagtagccttttgactgctgtgattaattttttagttcttctaaaacctggttttccaagtcagaaggtcgaccgccgtaccgatctttaaaaacttggtagacctggtccggcccaatttcttggatcacagagaaaggtccccattctaaatcccgggtgatttgccagacctggtctatggtatctttttcactaactcccttaacatagagttttaaggccccttctaagacactggtcaaaagtctagtgtagatggcctggtctcggttcttgtctgggtcttgcgaggtctgaccaaaatccttaaagccaatatcactggcctggtcggtaaagccctcttcttggaaggcaggggtcccatcatagtcataaaagcccttgccgtctaatttacccccttgacctttttcaatcatggactcaaatagggcaaccgtatccttaagccagtcttcagcctggtctgggtcagcttctacctggtcttggagtatattcttcggtgtttcaatcccaatgtggtcaacaatactaaagggtccgtcatgggcaccggttgcctggatccaagcccggtcaatgtcctgggctgaactatcgcttgtcgctaggaggtagtagccagcattgaaaaaaggtctcagtaagctgtttaagatatagcccgactgctccttaaacaaggggatagggaccatgttaatagccttggcaaagtcgactgcctggtcaaagctttcatcggatgtcttttccgtccgcattatttcagcaatattccggtgccagatttcattggcaaagtggatggctaaaaattggtctggtcggccagtttctgccataaaatcagagggcaggagggttgaagtgttggtagcaaagagggtgtggtctgggcaagcctggttgaggtcttgataaaagtcctttttaactggcaatttctcaataatggcttcaatcaccaagtcagcttctttcccagcctccttgatgtcagtggtgtaagtaatgctgtcagctgcctgtcttaattcatcatgactatagtctttttttgattctttttcaaagcgggggatgtactgttcaattttattcttagccccatctaagccctcttcgaccacatcgtaaatggtgactttaaagccagacacagcagtctggatggcaatttgggaccccaagactcctccacctgcaatagtaacgtgttcaatcatgcaaacaactccctttctttccttgtctttcttccaatcttagcttcattataggattttagctttgtaagcgcaatcaaattgcttgtgtcaagtcttccaaatgagaattggctagctttaacccctttagaaaggactgtgggcaaggcaaatccagtgtgagggaaatttcaggtttggaaacatacgttattctcaaactggaagtcaagtttgagaattttttcctggaattctcaaacaacattggttattcgagaatattcctggtttttctcaaacaactcttgttattcgagaattcaccaatatttttctcaaacaacaaatgttatacgagaattgctataggtgatctaagaacaaaagttatatttaaatcttacacaaagacagttccatagttttccaaaatctaccaaaccgggcaaggtcattaagcaagataccctccaaactaaaaacgagcctactggagtccagtaggctcgttttcttctaagcaaggactagctggctgggccaagaatactggcccaactgctaacggttattcattttgtggcgagatattagcaagggctaaagcaaggttaggaatttagcatttttaatcctcagccaagtgaacgtcgacaatttccaccttgattttttcttggggaaggtccacttccacctggtcaccgacctgcttgcctaacaaggacactgccatgggagactcataggaaataataccagccaaggggtcagcttctgccttaccgccaatggtgtaagtctcttggtccccgtctggtaattctctaaaggtaaccgtcttacccacggctaccaccggactttcaccctctccttcttcaatcaagaccacattgtctagcatattctccatttccttgatctgcttttcaacatacttgtattcatctttggccaaggtgaagtctgaattgatggggatatcagcattccccctcgcatctttcatccggtcaagcattttgctggactggttttttaagtcctctagtcgcttttgcgatcttttgagaccctttttagtcatcggaaatttattgtccatcttacaaactcctctctttagaccaatcagtctttgtaagaccttaaaggaccataacagtcctattatagcacacaagaccatatatagatataccaggcacttcaccaggcctttaagcttcagagtcatcaaaacgatatgacaagttgctaagaccttgctttaactcgtcacttccttgctaagcacttgactagtcagtcaggccttgcttttgtataatgagtctaggaggttttgcccatgactgataatccaaaagatatttccaaagaagaaatccaagacaaattagctgacttagacaattgggaattagtggagggcaagaaaattagcaagtcctattcctttgatgacttcaaacaagccctcgacttcaccaataaagttggccaagtagcagaggatatcaaccaccaccccaatatctttttaacctggggcaaggtcaagataaccatccacactttccaaaccaatagcttaaccgcaaatgacttcaaattagctcagaaaattgaccaaatcgatagccagtaaaaaggaggattaaaatgaatcctcttctatggcttccgattttaatcgtcttgattatggtcctcaaagaaaataacgataccgacgattaaataaacaagcgacttcccgtccaagaggcggaaagtcgcttttccttatttatggtagggttcattgcggataattcgaaaggcacggtagacttgctcggctacaatcaaccgcatgacttggtgggggaaggtcattgggccaaaggaaagttggtgctgggcccggtcaagaacctcttggcttaagcccaaggaccctccaataataaaggtcaacttactctggccgtaagtcatcttgtcctccaaggtctgggcaaagtcttcagaagtcatttgcttgccgtttaggtccagggcaaagacaacttcttggctggaaagcttttgtaaaatccgctcgccttcaagagccttgacctggttcatttctgcctggcttaagttttcgggggcctcttcatctgctacctccacaatctcaaacttagtataggctcctaagcgcttagcatactcctgaattcccttctttaaatacttttccttcaacttacccacagcaatgactttaacctgcatccatgtctcccttcgcttatccactgacttatccacaattgtgtataaaatgttccctttacaaaatatcaaccttatattgacaataatttaaaccaaacaagagtgtactttatttttatccctttcttttatccacacttatcaacagcttttttacacatccagtcttatttcactaggttaaaaaacctatgcctaaaacctttccaggaggtcactctaactttgccatccctttatccacaatccaaaatagtcctgtggatacttttagcctatggttatcagcttggccaaggcttattaacagtgtggataaatttgttcacaagaagtatcttaacagatattttactggaaataaatcaattctttccacaataaaaaggccgggcttgaaacaacccagcctgattgatttaatcggttatgtttccttgtttacattgagagaatatcttcggtttccatggtaattggcagggtcatactttccccttgacggataatgtcaatttctacttcatcaccaacacgggtttcgtagacagcctggcggagttgcatgctattttcaacctcttggccgttaaagccaaccacaatatctccgacttctaggtcagcattgtcggcagaagtgcccggagagacatccatgatgactgtaccggattcaacttcctggtctgtaccggtgatttcagctatttgctcttcagacaagaggttaatatctaggagggagacacctaggattggtctaacaatttcaccattggcttctaactcttcaataatggatacggcatcgttacttgggatggaaaagcccatgccttccactgcattggaggaaatcttcatagagttgatcccgatcacttggccactggcgttaaccagaaggaccacctgagttgccagggttgatggctgcatctgtttggatagcagacatttcccagtccatggtcccgtcattgtcaatatcgacaggaactgtccggttaaccccagaaactaccccagaggtaacggacaaggcaaagtcactgcctaaaggagacccaatggccacagctggttcgcccagggtaatgccctctgaatcgccaaattctacttctgtatcggcatactgggcatcaatggccaatacagccaagtctgtgtattcatcagctccaacgatttcagcttcgactgtctccccgttagagaagaggacgtcaatggcatcggacccttccaccacgtggttgttggtgaaaatataggcttggtcgccgtcaattcggtaaatagccccactaccggtgccggcttcgccaaggtcaccttctgcctcctcttcttccggcaattctaagccaaactccctgaaagggttttggatccgttgtttgttgataatggtcacaacagcattttccacattttcaacagcttgggtcacatcagtttggacagccacttgctggccttcttggttttgtccctggtcttggccttcctggttttcggtggtttcttcttcctggttgggtgcttgaccgctttcagggtcttggcaagctgccaaggttaaagtggtggcagaagcgataagtaaggatttaagtgtctttttcattcatattctcctttaccgaatttctctcccttattataaatcattggtttgaaaaagacatgaaagaatttcaaatcaattgtaaccgctagacaatgaacaagggattgggttcataagggtcagtatcgtgcagttcatactggtagttcacacctgtgtctttttggtctaagatctcttcggctgtggcatgggcaatatttttcatgttgttttctaagctcaagtgtcccaaaaagacattccgggtcttgtcacccactatttctgacagggccaaggcactgtcttcattggacaggtggcccttgtcgcctaaaatccgttgcttgaggggccaaggataccgccccatccgcaagagagataggtcatggttgctttcaaaaaggtaggcatccgcattcttcaagtaagcccgcatccggtcactgacataacctgtatcggtcaggatgacaaaacgcttgttggccttttggaagctgtaaaattgggggttggctgcatcatgtgacaccccaaaactggacacatccaagtcttgaaatattttcgtttggtctttgaagaaatggtgctggtgggcagggtcaaccttgccaatcttcttacccatggcctgccaagtctcttcattggcatagatatccaagtcgtacttgcgagataagactccgacacccttaatgtggtcattgtgctcatgggtgaccaagatcccatccaaatcatcaggtttgcggttaatcttagccaagagttcctgggcttttttgcccgaaaaaccacaatcaactaataattttacctggtctgtttcaatgtaagtcatattaccagttgaaccactggctaatacgcttacccgcatgtcatctcctgtttccttatccatgacaattctcctaacactttatcttcatcgttataagtctaaaatagaatttttcgataatcaaacaataagtgaaactaagcaaggggaggatgaagcccttcctgcagaacttagccgagccaaaactgcctggtccttgacgttcttagtgaaagttaaagtggttttagcaagctaggccctccatgtgtctaaagcatgagttcatgggttatcttgccctagcaagattaatcattcatctgttcttctgcattttggtcctggtcattttggccttcatcgtcgtcttcagccggatcttggttctggccatcatcctcaccgtcagcttcttcaaaatcctggtcgccctcatcatcacctgactcttggtcctcttcttcctcttcaaggggaaagacagctgggttttggataatagtcccatttaaagcgtgaacccggaagctttgcttaccggaagcagttgagacccggaccacccaaactggggtataaatactcaaatcttctaagtcgagggtccggtggtaagacaagataggcaggtcaacagtcgaacctggtggaatgtcattgttttgaaagaggatttgaacagcttccaagtcggtaatggtctcttcctcctcaccttggtctgtcatcggcccagcatagagctggtggtaggagaaaatatcgttgttggaatcgataaacaaggatatttgcgaagtcccatccatgaccggtagaccattaacactttggtagtaaataaagcgactcgtttcaggatcaaactcgccataactgtactcctgaccaaataaaacatagtctgatttgacaaactcgtcaatagccatataatcactgtctgtaaatccgtcattaggattgccgtctaattcaagggggttggacaggaaagaagtatagtaggacccatcactagagacagaacctgcctggtcttctaggtcaataacttcttcttccaataaatcatggtcgtcagcttgaacagccttaacctcatgctcaacttcttcaaagttgggtaggttgatatcagactggttcatccgttcaacaatattgaccgggtcgtcaaaactggtggcatagtggagactggaccggttggtatagctgttaaataaatacaaatttaaaatggcaaaggcaatgataaagatggtctcaatttttttaaagtccattaaacatcgcctccttggtccataaagtcgtccaagcttgtccatttgtcttgacttttgacaaaccactcaggtgtcaacctaacaacttgttcttcttctctcgagtcatcccaggtgtagccaatggtcaaatcttggaccaggtctaaatcaaccacactggtcaagtcagcaatgacttcttctcctgaagctagattaacttctgcatcctcatcgatagacaagggggtttggataatcaaaaggggcaagcggagttgggacaaaccttcttctaaaacaccgacttctgtcagagtattcaggtccccttcactaaaaatcggccagccatcataatatcttcggtagacgacctgcttgaattggttgttgaccccaccatatttaatttcattgggccaattctccaaggtattgagttcgctacggctagctataaagcgctcacttgttgacatttcattcagatcacttatctggcggaagtaggtcaaaacatcactcgcattgttaatccgcaactcggtctgcaagtcaatgtaacgggaaatattattagacacccggagctcaacaccggatggatcagggaaaaagtgggtggagtacaggctgttcggcaggcgttccacaacatggtagtggttttgcaatgtcacttctgtatttgggaggtaggcatacttgttttgaattttttcggggtaaacactaaagaggcggttgccctcatctgccaagaggtcctcggcttcacttaggtctaaactcaccaggtcaacctggtataagctttctgcctggctgttataaaaatcgatctcctggggggattctaagtcgattaagaccctgtcaaattcttggtctgccaggtcagtcgggatattttcaaaacttgtcccaaacaagccaaaaggaaggggggccggaaagaccaactccaaggactgctggctagcagctacctggtcttgatagtcatctagggacaagtcctcgccttcatccaatgtgtccaagctcatgctttcaatggtcctgctaaagctatcgttaaagacagacgggtcataggaccaagattcatcttcttggtggtagataaattggttgggggagtagacttcattggtatctcgttcaactaggctggatgggctagggttgtccccttgggaaagatagccatcatcctggtcactgattgggacccatatcttgtaactcaaatagatacttagtaagatcaacaaggctaaaatgacgtgtttgatgcgggagtaggtcatgccagttcatcctcactttcgaaaggtacaatcggaagagaaatatagaaggtggtgccaaccccttcttcacttcttacccagatattaccaccgtgttgttcgacaacctctttagaaatagccaaacctaggccacttccccccatggctcgggaccgggccttgtctacccggtaaaatcgggaaaagaccttgtttaagtcggcctgaggaatccccatcccttggtcagagatggacaattccacccggtcggtataagtattatgtctggcccgtcctgtaatcttagacccatcaggggagtacttgatagcattgtttaaaatattgtctaggacctggataaatcggtcggtgtcaatttcgacaaagaccacttcgtccatgatgtcgcgttcaatcgaataagactggccactgtaatcatttgaattcaaaagcatttcaaaccggcctaaaacatggtcaaacagttctttgatatcaataatctctaagttcaactggctccgcccagtatcaatccgagacaattggaggaggtcttccaccatccggatcatccggtctgtttcgtcagtggtgacttgtaaaaagcggggagccaggtccttgtccttccaagctccatccgacaaggcttcaaggtaacttcgcatggaggtcaagggtgttcttaattcatgggagacattggagacaaattgcttccgttctgaatcaatccgcatttgctcagtcacatcgtggaggacacaaacataaccgaccacataacccgactgacgctggatggctgagaaggtggcccggagaatcaagccttccacggtatggtcggggtcaatataaatatcatcggactggtttaccaaatcttccagctgggtctccttgttcaagtcaatcaaggtccggatgtcttggtttttaacatcttcttctgcctggtctaaaaattctagacccatggggttgacagtggtcacccggccagtccggtctgttgcaataactccatctgtcatatgtgtcaaaaccatgtccaatcttcgacgttcagattctatggattcctgggctgtagcgacttcttctgacaggtggttgatcaaattggacaactcacccaactcgtcgttaccgtggacagtcaattgaccggaatagtcaccgtccgcaattttcttggttaactcttgcatgtcaataatcggcttggtgatggcccgagagataatattagccaagactagagacacaatgatggctaagacggaggcctggataaaggcaaaggtgatctcatccacttcatcgtagactgactcaatattactttccaagctgactgccccgataaccgtggcattatcctcgctggaatagactggctcaataatcttgtagcggcggttgcctgtagccggatcaatgacctgctgggtagaattctgcccttggataaccgcatttcgtgctgcatcatcgtcagtcagctggccgaccagcccctgccgggtatcatcactcaaggccaggatggacgaatcggtgtcaataatagacagttcggttaccaaagggcctgaatagtcattaatcaggttttggatctctgcttgggggtcaatatcctcatcttgttcaggggcatggagtagctccaggtaggggcggaccactgtttggatataggaaacctggtttcgtcgctcctggtggaagttactgaccaggttctgttcaatctgcgtaataaaatttgccccgataaattgcagggcaaatagaaggatcatgacaatgacaaagataatttttgtcgaaatggagctgataaaaggtattcttttctgcttgccctttttagccaaaacgcttaactcccttactcttcaggatttcgcaagtagtagcctactcctcttctggttaccaaataattaggatggctgggattgtcttcaattttttcccgcagccgtctaacagtcacatctacagttcggacatcaccaaagtagtcataaccccaaacaatctcaagtaaattttcccgggtcatgacctgaccgaggtgtttggccaagtagtgtaagagttcaaattcccggtgagtcaattcgatggtctcatcctttttggaaataatataagcatcggggtggatggttaaatcccctaccgtaatgtcggaattttcctcttcttgactctcctcagccgattggacaaccgattgacgtcttagactagctttgacacgggcagccaactcccggttagagaaaggcttggttacatagtcatcggctcccatctctaaacctaagaccttgtcaatttcttggtctttggcagtgaccatgataattggcatgtcatgagttttgcggatttcgcgggtaacctccaaaccatcctttttgggtagcatcaagtccaatacgatcaagtcagggttttcttggttagcaacctcaatggcctcttcgccgtcaaaggcaaccacgacttcatagccttccttctcaaggttaaacttgacaatatcggaaataggtttttcgtcatcaaccactagtattttcttcattattatcctcctttactagctatgatcctgataatcagtaatattatatctcatcaagggtctggattcaattcgagcttagcggttgtcaagctcttggtaacttattttacaagcctgactttgcttggcctgggcctggtcttgggggtagacctcaacgttgaggtccaagtccttgttaaacaaaaagacaaccgagatagccaggtccggtcgcttgctcttcaggtagtccaagtcgattgtcccgagcaagtcccctgcttggacctcgtctccctgcttaacttgactggtcagaccctggccattgagtaagatggcatccggtcccacatgaatcaggattttgttgtcatcagccaggttaatatagtaggcgtggtgactgcctgctaactggctaatctgaccagacacaggtgaatagatggccccgcttgaagggacgacgccgtaaccatcccctatcatcttgtcagaaaatacgacatccttaacctcggttaccggaatcacttgaccatctgtcactgccttcagtattaattcttttttgtcgcccattatcagctctccactcaatatgtattgtattccctaatcataacaggtaatattcagccagacaatcctcttttggcatgatcttggcttaaaaaggttttttaatttctagcctgcttggccaaccattccccctttaaccacttggcagcaaaccaggccattttagtcaactatgatccaattgcagcctggccaatcggtcttcagccctatttttaaccttaaggtcgttttcctattgccatcctggtcaaatgagattatattttatttatcaaatactgcatggtggctggtggggtcgatccttttatgaaaaggaatacaatttcttcctagaggctgccgtgtaaaaaaggagcagatgatatgtctggcagaatcaaaaaactcgtcctaaccctcctggctattggtcttatcctggccctctttcttttggcttggacctacttcagctcaagtggcccagaagttgcaggaggagaagacttagaagaagcagaagacctataccagtcgaccaccctctatgaacaagatcccatcaccgttaagggatttgcccagctccaggtggaccaaagctatacttatgaccctgaactgggagaaatcgaaaccgtccatgtggcagatggccaagaagttaaaaaaggcgaccgcttgtttacctaccggaagacagaccaggaatctttagttgaaatcgacgaactcaaacgagagcaaaccaagctctacaaccagagacaagccctccaagctagcctggccaatgcccaaaatgcttgggccaactaccaaaagcaagtcaatatacaagaaccactacttgcaagtcaagaccaggaggaagaagtgggtgaagaaggagtagagcctgacctagccttagacccccctgctgacgaccccgccagcatcaaggcagccatccaggaagtcaacctccaaatccaagacctggaagccaaactggcccaggcccaaaacagcctctaccaaaatgtcctagccaaggcagacgggacggtttacctggaccaaagaggacgggatgacaaccgccaggcttttatccgtttggtgggggaccaggtttacatccgaggctcggttaatgaatttgaattttttgccttgggagacaaccggattgtggacctcttcgtcccagctgaaaacaaggaattaaaaggcaagatggtggaatatgaccgcttcccaggttcgggccaagaaggaagccaaagttctgatgaagagaacctagactccggtatgtgggctggagacctgggaggagaccaagccagcaactttaactttacagtcaagccggatgactacattcaaccaggcttttccgttgaaatgctcatccaagtccccggtatcgccatcccttctgaagccattgtcctagaaggggacgaccagtatgtctttgcctaccaagaaaacagccaaaccgttaaaaaagtgaaactggagtcagaaccagctgggcaagcccaggtaaccaagcaggcagacctcaaggcagggacccaagtcatcctctatcctgacggtttagaagacggccagtctgtcagcctggataccggtatggaagaaggagacttggaagggatggaagactacggtgaggaagctgtaggtgaagcgatggaaggttggtagaatcgatgacaagtaaagataccagtggcaaacaggcccttattaacatccaggacctcaacaagtcttacgacctggccggagaccggctccaagttcttaaaaacattaacctgaccatccacaagggggaatttatttccatcatggggccgtccggttctggtaagtcgaccctgatcaatgtcttgggatttttagacaatgattttgacggccaatattactttatgggcgacttggtccagtcctatagcgaccgggtcatctcaaactaccgtaaccaaaaagtaggtttcgtcttccaaagttttaacctggtcgaaaacatgaccgtcaaagacaatgtggccctccccctcctctaccagggcatgcgggccaaggacacagtagcaaaggtagctgcaatcttagaggatatgggattagctgacaaggtcaagaactacccccctgaactttcaggtggccaacgtcagcgggtagccattgcccgagccctggtcatgaaaccggaatttttaattgcagatgagccgaccggggccttagatagcaaaacctctgcctccatcatggccatcttaaagcggatcaatgaggaagaaggcgtgacggtggtcatggtgacccacgaccccactctccagtcctatgccagccgccacctggtcattactgacgggaagatagaagaaaaagaccgccaggaagcagaacgcctggccaatttatacaagcaagagcaagtgattgaaaaccaaggaggtggagtggatgaggcttagcgaactgcttaaaactgcctttctcaccatgaaactcaacaagaggcggaccatcctgaccatgtttgggatcgtcatcggcattgctgccgtcatcaccatcctctctttgggggccggctaccgcaagcaaatggtggactccttgaccaaggatagccagggccggattaaccaatctttttactttatcaacgaagagaccgtagatgactacctctccctaaaaccctttacagaggaaaacctggagacaatcaagaccatgccaggagtcctcgatgccgatttggggaacacggaggaagaagaacactacctggaagtaaaatcaaacgaatcttcagtcgggtcaccagatgatatggagggggagtacgaggataattatgttaatgtcaaaccttcagaaaatgtccaagctaaccttttagcaggccgggctttgaccaagctagacagtgaccgtcacctccgctatgccatgatcgattccgacctagcctccagacttttcccaaacgaactgaattttgatgccctcatccaccgaaccctcacggttgaaggccaggcttttaccttggtaggcatttatgaaagccaagagcccactgacccggaagcaatggacagcccttttcaggaagccatatccactccaccccaagtctacctaccccaggagacttttaccctgttaaatggaccagtcttccctgactttaacctaaacgtatactaccaagaaggtagcaacatggcccaaaccaaccgccaaatcaagaactacttggaagaagcgggaggcgaaaatgacaaggggtcttatgactacgatgatgtgtctgaatttatgacagaaatcggccggcaattgcaactaatcacccttttcatcaccttcattgcctctatctccctctttattgctggggtgggggtcatgaacatgatgtatatttccgtttcagagcgaaccaaggaaatcggaatccgccgggcgatgggggcaagcaaaaaaagcatccaattgcaatttctatttgaaggaattgccatcacccttgttggtggtctcctaggctatctcttgggtattggccttgcctttatcatctccaactacctcccctacaatgccatcatcgacctgccaactgccctggtctccgttatcgtctcaaccgttattggactggtcttctccgtttttccagcacggacagccgccaagaaaaatgtggtggaaatcttacgttaagtaggggcagaaaggtattgaatacaaactgaagaagggatccagcctggctggatcctttttattagggctgggcttgtctagtcaataaaaatcttgcttgcccaagtctggcttgtccaaggccaaacctgctattttccatctggcaggaggcttgaggtgtgttataatgcaggtaataaagagataaagttaggtaggattatggagaaaaaattatttgtttttaaagtagggacctcttccttgacccaagaggatggcagtttagaccggattaagttggcccggatcacccggcaattagcccaaatccaccagcaaggccacaaactggtcttggttagctcgggatcggtagctgctggctttagccggctcggacttagccactaccccagccggattgccgaaaaacaagcctctgccgctgtgggtcagggcctcttgatcgaagaatatacccacaacctgatgatggacagcatttgctcggcccaagttcttttgacccaagaagacttttccgatgccagacgttataaaaatgcctcccgtgccctccgtgtcttgctcaaccacggggctattcccatcattaacgaaaatgataccattgccattgaagaattgaaggtaggtgacaacgactccctgtccgcccaggtagcctccttactcaaggccgacttactggtattgttgaccgatgttgacggcctttacaccggcaacccaagccaagaccctactgcccgccacctgcctgtcattaaccaaattacacccgacctctaccagatggctggaggtgcagggtcggccaatggaacgggtggcatgacgaccaagatccaagcggctgaaatggccaccaaggctggagtccctgtttttatctgttcctcccagtccgatacagccctgatccaagcccttaaccagaacatcaaagggaccttgttcaaggccaaagcagaaaacctcagtcagcgcaagcaatggatgaccttttatgccaaggcccaaacctcgattaatattgacgacggggctagtctggccatgaaagaagaggggtctagtctcctggccgctggggtcaaagaggtcaaggggcaattcaaggttggggacgtaattgaagtttaccgggccagcgaccaccacttaatcggacgaggccgggccccggatgacggccgatgacttacgcaagctcctccaaagctccaaacccaagggcattgtgatccaccgcaatgactgggttaccctctaagatagtttagaaaggacgacaattttgactacaactcaagcactactagtcagtttgctaaagaataaagcttctatcaaccaggcttctagccaggataaaaaccaggccttacaagccatggcggaccaacttttggccgaaaaagaccacattttacaagcaaatcaaaaagacatggcccaggcagaaggtaagatcggacaagtcatgcaagaccgcctcctcttaactgaaagtcgcattcaggacatggcccaggggatcttggaccttattgacctgcctgacccggctggccgaatcctggaccaatacgaagctaccaacggtctagtcattaacaagctagctgagccttttggtctgatcgccattatctatgaaagccggcccaatgtaacttccgatgcggcagccctggccctcaaaagtggcaatgccactatcttgcgcagtggcaaggaagccttccaaacttcccaagccattgtcacagccctcaagcacggtcttgccaccagccctattcctgacacagtcctggaactggtccaagataccagccgggcctcatcgatagaattaatgacagccaaggggcaggtagacctcctgatcccccggggtggcgctggcttgatccaggcagtggtcgaccaagccaccgtccctgtgatcgaaacaggaaccggcctctgccatatctacgttgacgcaagtgccaagttagacatggccttaaatatcgtcgaaaatgccaagtgtgaccggccctctgtttgcaatgcagccgaagccctactagtccaccaagaccaagccccaagctttttgcctcgcctagaagacagactaggcggccgggttgagctcctggcggatgaccaagcagctagctacctccaacaatttaccccagggacagaagaggacttccataccgaacacttggactacaagctatcggtcaaagtcgttccctctttagaagaggccattgaccacatcaactcccactccaccggccacagtgaagccattatcactgaagacgaccaggccaaggcagcatttacccgacaggtggactctgccgccctttatgtgaatgcttccacccggtttaccgacggcagtcaatttggcttgggttgcgaactaggcatttccacccaaaagatgcatgcccggggtcccatggggctcaatgaaatgactacctacaaatacgtcattgcaggcaatggccaaatccggcaataaggaaaggagttttaggatgaaaatcggttttatcggtctaggtcagatggggtccgccgtggctagggctgttgctaaaagccaagaaggggacttcctcttaagtaaccataaccaggacaaggcaaaagccctccaagcagacattggaggggaggttgtctccaaccaggccattgcccagtcaggagacctcatcttccttggggtcaaacccaatatactagtcccccttttaaaaaacttgaccgaaaaaaacccggtcaaggatgaaacagtgtgggtttccatggcggcaggcattcaactagaccgcctggctgaatttgtcccccaagaccggctaatccggatgatgcccaacactcccttaaggcttggagctggcatgaccacttatacctgctataaccctgacctaatctccctctttgaagacctcatggcccagtctggggaggtcaaattcctggacgaaaaagccatgaatgctgccacagccatcgcaggatgcggtccagcctttgcctaccaatttatcgaagccttaatcgatgccggcatccaaaacggcttgacttatggcgacagcaagctgctagccagccaaaccctgcttggggccggcctcatggtcaaatgcttagacgaccacccagcccagctccgccaccaggtcacttccccaggcgggtcgaccatagctgggtcggtatctctagagaaaaacaagttccgccacgccgtcatcgatgcggtcaactctgctttggcccaaaaccaaaagttaggggaagactagggaaatcttgtttttacagaccgaccaaaaatggcccttaccaaaaactgggaattgattttttgtcagaccggcagagaaaactagccaaaaaccaaaattagggtttgcttattttaatagactgccaagacaggaacttttttagctttgcttttccattcaaaagatttcgctaaggccaaacagccactctttttcccattaagcagatttttgaaagaattttaactattccttcaggacaaataatttggatcatgcttgtcgttagggctctttcgtggtattcttaattcatctatttattcattttattctgtctctttctgagcaggtagattaggaggttattatgtctactccctacattatcgctttgtctcttgtcattattgctattgttgccatagtcattgctgctgtcgtagcttcaaaaaaagtgaaaccaactcttaataaaatggattccttgtctgaaaatatcgaagatgccgtcgaccggtatgggaaagaaggtcaggccatccaagaccggatcgaaaaaatccaagaacgagtggcaatcacccaagtcgatgcccagcaaaaaataggatcgcttgatgaactacaagaccaattccaaagcttatcagcttcactagcctaccttaaagaccagagccaggacttttcacaatcttctcgtcaaaacttgactgacaagatcaaagaagaagggccagcctacctcaagctttaccaaaaagccttgaaaggcaccttcaaaaaacaaaaagaacgctatagctagagcattacaagtttaatcatctgaacaaggagtggtttgcatgccaaaagttagcctatcaaaaacgatattcttaacagctggggccgcactcggagccctcttatttgcccctaaatcgggcaaagaattgcggaaagaccttaaaaaagaagccaaacgcttgggtggagaagccaaagtttatgccaacaacctaaaagatgacttcgatgaagcctaccaagaagccaaggtccaagcccaggaagaaaaagaagaggctgccaagcaagaagaagaattagcccggaccatagctgaaattgagcaagaacttgaagaaagagaccaggtgacccgccaagacgaccaaggtgacttaaatagagtcccagacaatgtcttggaagaccttgacctaggcgacaccaaaaacaccagccaagagcctcaccaagaccaggttgtcccccgcggtgaattagatgaagccttggatgaccaagacttagaagatgacccttctttccaagccaatcctgaataagaccaagaaaaagcccaggatcctgagagcaaggaccctgggcttttttgactttaatttgttataagtttatcccccgtcttgctttggggatgtataagttatttttctgtcagggattgtagaaatttagcctgctaaagttggaaatttccgattctcatataacgtatgttgtttgagaaaaatagtggaaaattctcgaataactaatgttgtttgagaaaatcacggcgaaattctcaaataacacttgtagtttgagaaaaccagcaaaattctcaaacctgaacttaagttcgagaataacttatgtttttattgtcctttccaaaaataaagcatggttctcggctatcatttaactgacaatccgacaaacctaaccatttttaaatatggtggcgccaggtagaaggagttaagaaaatcaagagaggataaatttctaaacgaccggcaatcatagcaaaggataggaccagcttgctcagagggctgacagctgccaggctttcgacctcgcccaaggtcccaagggtgacgccagtattgtttaaggttgccgtcacaatactaaaggcagctgacaaggaagaaaactctagggtcataaagagcaagaggaggataaaggtggaaatatagacgataagatagcgactagtagactggataactcgctcatccaggggttcgtcttcaaaatggatggtcacaacccggttaggataggcattttgcttaacctctgcaaacatagttttggctaaaaccaagacccgggagaccttgaaaccacctgaagtcgacccagccatcccaccgataatcattaagaggaggaggataaacttagagaaaatgggccattccccaacgggtgacagctcaatcccggttgaggtaatcatagaaaccacggtaaaaccagcttggtggaaggcttcggggaaggactggtagacgaaataaatattgacactgaccaagaggactgccaagccaataatccccaaataccacttgagttcatcatactggaaggcttttttgatgtggcctgaaatagccagaaaaaaaaggttgaagttaatcccaaaaagaagcatccccactgccaagacactttcaatggcgatgctgttataaaaagacacattgctattgtacatgctaaagcccccagtggccgccaccccaaaagtatggataatggcgtcaaaaggtttcataccaaaaaaaaccaaggccaaggcaacaagaatagccaagctaatgtagataaaaaacaagtagcgggttgactctgtaatccggggcatgaccttgccgtagcgaggccctgtcacctctgcctttaagacattcatatattcactatcggttgaaggcaggatggccaaggcaaagaccaggattcccattccccctaaaaactgggtgaaggcccgccagaagtggttggaccgagacaaaatttccacatcatttaaaatggtcatccctgtggtggtaaagccagaagtagactcgaaaatagcatcaaaaacggagctaaagtccccgcttaagatgaaaggcaaggaccccatcaaggacatcaaaagccaggttaaactgacaatgataaagccttccttggcatagatgttaaattgcttgggggtattgtgagacattaaataaccaagaagcaaggaaaaaagggagacggacaagtaactgagtatgtatctcaagtcttctcggtaatagaagctgactcctagggggaggagcaagaataagccattaaaaaagagcaagcggcccaccaggtatttgatcatctgtctgttcatccaacaccatcctcgcttatttcaatatctcgtcaatctcatccagaatttggcgggtcgtcaccacaatcaccttgtcgccaggcaagatgcggtcagcaccagttgggaaaagaaggtcgtcaccacggacaataaaggcaatcaagagatcatcttttaacttgaggtcaatcaagggaatattaatgatttttgattcagaccccacttcaaactgcatggcttctgcctggttgttggccacccggaaaaagttctcaaagtgggaagaatagtggtacttgagggcccgaacatagcggataatcttgtaggcaatgaggcgtttgggggtgacgatcgtctgcaagctaatggaccccatcaaggacataatccgcaagaggtccgtccggctaaccttggtaataacctttttggggtcgaaggtcatggcaaacattgaagttaaaatattgctttcatccaccccggtcaaggaaatgaccgcatcataagacccgattcgctcttcttccaggaaggactggtcagtcccgtccccttcgaccaccacacatttgggatacagggagctcaatgacttggccgcatcggtgttttgttcgatcaccttgactttgacacccttgtccaagagtaggccaataagatagtgggtaatccgaccaccgcctataatcaaggctgttttgatttggcccaccttgccgttaaccttggcatagaattcatttaatttatccttggttgagacaacgtagatttcatccccctctttgaggacagtttgcccacttgggatcaaggtttggccatcccgtaaaacaaccgtcaccaaaatattgccaaatctctggcggaaatcactaattttaacatcaatcaagggggaattttccttgatcaataattcagataggttgacccggccattggcaaattcttcgatactcaaagcttccgggtattggatgacccgcataatgtcttctgctgcttctttttcagggttaatcatgagggagatattgaggtcattttccataaaatcgatgtgggctgagtattcaggattgcggacccgggcaatggtgtgcttggcccccagtttttgggcgataatacaagcgataatattgagttcatcttcagaagtcacggcaataaaaatatccccatcttccacctgggcctccaccaaggtattatagtcgacacagtttccgatgacgcctgtaatatcatttttataaactaaacgctctaattttttctcgtttttttcaatcaaggtaatattattgccttcattggtcaactcaacactaagtagttccccaactttgccaccaccagcaacaataatgttcatctgtaaccttcctatctctagtaacctggctggaccactcatatagacccaatcatagcaaatattaaagtaattttaaataacctattgtaattcccgaaaaatcaaggtattatcgccttatgctataaggagatgctacgatgaaaagcttacataaacaccgcctttctaccccatttaaaatcgtcttaagttttttatttatcatcctagtgggatctttaatcttaaacctgccaatttcccaaactaaccagtcccaggccagctattttgaccacttgtttaccaccgtttccatgatttgtgtgactggactttttacccaaccagtctacctcacctacaacacctttggccaattggtctgcatggtcttgattaaaaccgggggcttaggcctattaactttggtagcagccatttttatcggaattaaccaccggatcaaccacagccaaaccgtccttttgactgagtccctcaaccgctttgaccagtcccagtttcctaattttatcattatgattcttaaaatgactagtttcttggaagccatcggtgcctttatcctgtcttttgtctttgtcccacagtttggttggctgaaagggattttcaattcctttttcatttccatttcagcctttaacaatgcaggctttgacaatataggaccgaccagtttaattaactatgcccaaaaccctgtcatcaatattgtcgtccccctcctcatcattgctgggggcctaggcttttcagtctggttcgaagttctggctatcgccaagtctgctatccggtcccgctttcggcaagatcgcatcccctttaaagagatttccgtccacacccgaatggttttatcggtcaccatcttcctactgctggctgggaccctggccttcttgttgacagaatggtccaacccccaaaccattggaagctacagcttggttgataaagtccaagtaggcttcttccaatcggctactatgcgaacagccggcttttccaccattgactatacccagatgattttaccttctttccttattgccttcgtcttaatgtttgttggcgggtcacccgggtcaacagctggtggggtgaaaacctctagtgtcatgcttattattttactaattaaaaatgaaatattccaggaagatagccttaactaccaccaccactccatcagcaaaaatattgctagaaaagccttggtcattgggatcatgtttgtcatcttaaccttgctctcttcctttttaatcagcatctttgacatgggagttaaatttgagtacattgtatttgaagtcatttctgctctggccaccgttggggtttcgcccaatttaaccgctagcctcagccggcttagccagaccattttgatgctcttgatgattattggccgtatcggaccgatcaccttctttgctgccctccaggtcaataaacgtcaaaaagtaaatgtgaaatacgctaaaggacatgtcttaataggataggagattagaatggcccaaacaattggagtacttggtttaggcatatttggttctaccattgccaaagaacttggtcgccaacaccacaatgtcattgccattgactgcaatgaggaaaatgtcaaccgaattgacccttacatcagccagggaattgtgggtgactttacccagtatgacctattaaaggaagtagccatcgaacaatgtgaccaggttgttatagcggctggtacttccttagaagcttgtgtcttagccattatgcacttgaaagagttaggtgtgcgaaacatcactgccaaatcaaagaaccaagactacatgaagattatgaaggaactcggtgcaactagggtcatccggccagagtatgaaatgggcttgcggaccgctcgtaagattatgaaaccccgcctcatggacatcatcgacttagatgacaaaacctccataatcgaatttaaaccacctcgggattgggtaggaagaactttatcaaacttaaaactacgtcagaccttttcgttaaatgttatcggactaaaagattcatctagccagaaacgaacctaccaagtagaccccaatgaagtgattaacgaagataccatcttaattgtcattggagacagcaatgaaattgaaaactttcgactagattaatgctatagaccaggtctaagaattgtccaagactgtcaaaaattagatgacaacttgactaaccatatgaaaaaggcaagagaaataactttctcttgcctttttgcttgtgtctaacccgtctaaccctagtttaggtcaattaactggctttctttaatatcttgaatggtttgagtcccagctagctgcataacccgtttcaagtctctctcaaagtattcgaaaacagaccgtactcctttccagcctcccagggctaatccgtacaagactggtcgacccaaagccacgatatcagctccggatgctagggccttgaagatgtgctcaccccgccggataccggagtcaaaaacaatgggaacccggccagatacagccttggcaatcccttccaaggattcaaaagatcctggggccccgtccaattgccgtccaccgtggttggacacccaaatgccagaagcccctgcttcaatcgctgttaaggcatcttctggagcttggacacctttgacaaagactggcaaattggagtaatcagctaggaaggtcacgtcatgaacggatatcttttgtttggactggccgtaaatattgttgagtgacatattcttagccccacctttcaagtaacgagacacaatgggcatgccaaaaggatagacaaagtggttgcggtcatctgtatcccggttacctgacacagtggcatcagcagttaagataatagctgaagctccatcagccttagcttcatcgataatatttttgtttaattcatcatctttggacatgtaaatctggaaccatcgggcattgccatttaagcctgctgctatttcgtcaaaattcgctcctgaataagcagaaatggacatgatcgatccaccgaattcagctatccccttagcggttcctgcttctttggactcatgggccagaccatgggcggcaataggagccataataaagggaactttgaggtcctgacctaggatggaagtgtttgtctcaggcttttcaacgtcagctaaaagacgaggcaagattcccttcttattccatacttcgatatttcgtcttagggtaaattcgtctcctgacccacctgacaggtagccataacctcccttggatacgacctcttcggcaaatttttccaggtcataagtgttgataatttccaaatctctgacttgtcttggtgcttgatattcctcagacatgaacagcctctcctttgtttatcattaatggcggagggttgggaaagctgctggtaaagtgtaaccctttccatccattcaagtttatcctaccatttgaagccaattcagaaaatatggattatttatagatagatcaaaaaaatttatatagagactaggactaatttgagccctgaacagcctgaatcctttagcctggtaaataattattttatataaggctgaactaactttttacagcagaaaaactctaaaaattttacaaaagtaaacaaatcaaatgagattgaaggggcaaatatgctattattataatatgtaataaggagattgaagggcttagcacaaaggctttggccctaatagaagacacatggatattggagaagattcttgctatgaaaattcaagatttagtatactaccgctacttagcagattgctcaagctttaccaagacagctgaggcctttttcgtttcacagccttccatttctatcgccttaaaacgtttggaggaggaatttgaaacccagctgatcaccagagaccggtcaaccaaaagctttgccttgacccctactggtaaaattttatacgagcgagccgaccaaattttaaccatcctggaccaggccaaacacgaaattaaaagcaatgaggaaaatgtcatccactttggctttttacccaccattgccggctacttcttgccacgcttaatgcccaatatggcggaatttgtccagtctatccaattggtcgaagatgaaagctccaaacacatgctccaactcctggaagacggaattgtctctgctgccatcactggtctaccagaccatgacctagagggagactgggcagagatttaccccatcgatacaagacctctctccatttgcgttcccaagtcccaccctttagccaataatagggaagtgactctcaaccaaattcgaaactactccttggtcaccctggacgaaaaatacgtccaccaccaaatcgtctccaactggatgggcaaggttggcatccagacctcccaggttacctttgccaaggaaatccaatccgtccactcccttattgcttccagcttgtcagtcggccttatccatgatgtcttggtccacgaccgacctgatttggtgaccatccctcttaaagagggcccggaatttaccacagccttggtcattaataaaaacttaaaactgaccgaagcccaagcagcctttaaccaaagcctcagggaaaaagttttccagctcaagcaagtctagactaactgatatgtaaataaaagcgctgattatcagttaacatttctttataattattcctcttgttgatagaaagattgcaaagaaaagtgttatcaataaacaagtgaggaatagtccgttaaagactcctattagtaaaattagttaatatagctaggaggtatatcccgaatgaaaaagaaaaaagtagcttttatatgtgttcataattcttgtagaagtcagattgcagaatcactaggtaaacaccttgcctcagatgtttttgaaagctattctgctggatctgaattaaaaactaatatcaaccaggatgccgtacggttaatgaaagatttatatggaattgatatggaactaagtcaatatccaaagttaatttctgaaattcctagtccggacatagctatttcaatgggctgcgatgttacctgtccttttataggcaaggaatttgatgcagactggaatttggacgatccaagtggtaaatcagacaaagaattcaaactaataattgagacaatagaagaaaaaatactagatttaaagaaagggcttagtagttattaaagtaactcacaatcagaaataatagtttggaataaccagggaatcatcgtattgctttttaatcaatacaccttataagatataaaatatgggtaaacattgataatgtgtataaagaaaaacggctaggagattgaatctcctagccatttctttgccacttcaaggctctctgaattagtttttataagattcctaattcaaggatccttgaccgttgttttttgtatcactttattcaaagtaggacaagagttttctttcttcctgtgttgcttggttacctaatgatttttcaatggtctggcgaacttgatcaaagccaatttctttcattcgcttaaaaggtccccaaccatgtgtggtttcccaaactttatctaccatgtcggcttcactataaccgttgacgactaactctaatgctgctttaaaaataccagttgagataaagttatagatgtgtagaaccttatccacttctggatcatccgattcttttccgtaatcttcgatagccacttgtggagtatcagctaaaaagtcatcttgcaagaattctggaattccatcatagttgtagtaacctttgccgtttaatttaccgcctcgtccttgttcaattagatcattgtaatctttaatggcattgtggatccattcttcatcaggataaattcctaaggcgaggttggattggttaacgtttttaacggtttcgatacctacaatatccataccaccaaatggaccaaagtcgtcgccagtggtttttatccaagcccggtctacatcataagctgaagcaaaaccggaatagtggagttcactaccactttgcaagaaaggtacaaaaagtgtatttaaaatatagcctggtttttctttatagattggaataggaaccatggcaatatcttcagcaaagtccataacagtttggaaagtttcgtctgtagtcttctctgttttcataacttcaccagtgttctttttccaaatttcattagcgaagtgaagagcaacaaaacggtcttctctgctagttgcttccatgaaagaagaaggaagaagggtagaagtgttggttgcaaaaatggtgtggtcaggggcaacttgagctaattgcttgtaaaaatcttctttgatatctagtttctctggaacagcttctacaaccaagtcagcatcctgggccgcttctttcaagtcggtggtaaagataatatccgctagtgcttggtctaatgcttggtggccaaagtctttcttggattcttcttggtaacgagggataaagccttccattttttctttggaagcttgcaagctatcttcagatatgtcatagactgttaccttaaaaccactgactgctgtttgtagggcaatttgtgatccgaggacgcctcctccagcaacaagaacatttttaatcataagacactctcctcctgtataatggtcgatttttttcttaaagggcaggcccattctgactgctagtttctggaaaaggcttaccccttacattatgaattatatcacaatataccttgtttgaccatcaatttttgatgaattcaggcgagaacaaaacttgaaatattgctatattaccaactttataagggcttttttttagcttaaataaatctataattttattttgtgaataaattaataaatatcctcttataccaagcagtccaggggcctctccttcacaagattaaaaaaccaggaagattacctcctgcttgcttgcctttacaatcttaagaagtcgggatttccaaaatgaaattgataaattggtcttggtccatcttgttaatataactagctaggtccatatccgacaaggcttcttccagggcctttctatctaagcggacaccttggagccgatcttctagctctgtccggtttttgacactaaagaagtctccggtaatttggatatggtcaatgatggcatccttgattttcaggccaacatggagggtgcccaccccttcgaagcgttcatccacctggtagtcaaagtcgccaaagtggccataagtccagtcccagttattgtagcgatcccgggcaatctggtcgatcccagcccagtcatcctctgttaaggtgtaccgcttagcctggtttaagtcactgattcctaagagttcctgtaagaccttgtctgagaagtcccaaaccgagatgtcctggtattctggcgccagagcctgacgcagactcccaatccgagaccggactgacttgaccccgtgggacttgattttcttactgttgggtctgagaacggtgtccatcacttcatagtcggggtctaacaagagggaatagcctgcatagatccggccattcaccacggtcatggccgccccagacacttcttaccatccagagttaaatcgttccgcccttcctggtccaaagcctggacccccatctttttcaagaccttgacaatggggtcatagatgagtttaaaattcccaaaaacatcattgggcttgtcggtccggataaaaaagcagtaactcatattccggtcatccaagtagaccgtccccccgcccgtttcccggcggaccaggtcaaggccctgttcttctaagtaggggaggttaacttcttcgtaagcattttggttaagaccaatttggactgcagggttgaccaggtaggggatgatgatatcatcatctaaaaaaatttcatcccgcacgtaggcatggagggagaggatggtacctaagtcataaacccactggccgtctcgtataggttcaattaaatacatggcaagtcctcctaagctatcttctttccgaggcaagccccaaggtcatccgagtccgctactagtttgggggccttttatgtaaaataacccggccaaggccgggttacgaggtcaagacaagactttatgcgtcttctagtttgttatattcttcttccgaaacctcacccaagcggacaatccagctttcttcttgtttagaagagttcaatagttctggatttttttcggcttcttcatggcgggcaacaattctaccagcaagtggacttaaaacgtctaagactgttttagaagcttcaatgttagctagggtgtcgccttctttgatgtcatccttgtcgacaaattcgacaaaaccaacagtcccaacgtcatcttgcatctcaggtgtcatactaataacgtattcgtcaccttgtttgtctacaaacaattcattttttcgcttagtcattctctaactccttttcctttaataatcgaactcattataacaaattactggtttattacaaagcatcactgcttttatagactagtcaatccaaactctcttgtcagttaaaaaattgtgttatagtgaacttgattaaaaataggaggaatcaaccatgtcggattcaaacgatcactaccaagacctgttagaaccctttcgcttagccaatggggtccagttagccaaccgctttaccctcaaccccattaccaccaatgcttccacccgggaaggctttgtcaccgaagaggagactgcctatgccgcccgaaggagcaagtcagcccccctccaggtgactacagctgcttatattgaagactacggccaattgttcaaatacgggcctagtgtccgcaatgacgcctttattccgggcctaagccagctagcccatgccatgaaaaaagacggggccaaggctatcttacaactggtccacaatggccgctttgccaagatcgccctccaagactacggggcagtttacgggcccagccccctccacctccatacaccaatcgaacatgatgtcatccccatgtccaaacgcaaaatcaaccatgtcatcgaccaatacgcccaggcaaccagacgggccattgaggctggatttgacggggtggaaatctccaatgcccagcgtcttttgccccaacaatttttctcccccttctccaaccaaagatcggatgagtacggccctcaaaacctagacgaccggtctcggttcggagtagaggtcacccaagccatccaaaaggttattgatgacttggcaccaaaagactttatcctgggcttccggggaaccccagaagaaacgcggggagctcaagttggctatacggtcgatgaattcaatggctatgtggaccgcctcctggaagttgccgatctccactactatgccatcgcttcctggggcaaacatatctacctcaacaaggtccgggcccaagaccaccagggccaattggtcaataaagtagtctatgaccactttaaaggccggctacccattattgcgactggtagcataaacagcccagacaaggcccgacaagccttaaaacatgccgatttggtgggcatgtcttccgccttcgtcaccgaacctgactttgtcttaaaactccagaagggacgggcccaagatattgacctgggtcttgaagcccaagacctgtctgacctggctattccaaaaaaagccttccaagacattatggaactgatggatatcggaggatccatcccccaagaaggccgggaccaactccggggcttggctgaccaggattcgacttcctactttaaagaatttaaataaagcacaaaaacgcaggtggagggtaggccacctgcgttttcatcacacacatataaggaaaatttaaaatcaatcacacacatattgtcatgaagagttttaaatcacacacacttaaatttagggcttattgttggtcagcgtattcttcgtagtcttcgtttggattgtcatcattttcccaaccagcatagaaaccttcgcctgtttcattggcatagtctaaggtttcttggctttggtattcatccaaaaccttgttcaagacttcatcgtcaaccttatcttcaggaacaacaaagtttaatctgaaccatttggaagtattggaagtatcttcaaagtagaagttgttgtcaaggtccatgccgctttcggcagccatggtagctccaacaaccactaattcagaaatcccctaaggaacgcggaatttgtccagcttccaactcaacaaattctaagttcaatgggttgtcaacaatgtcatcctgggtaggagttgggccagcatcttcatctaagctgataaggccagctttttccaagtgggttaaggagtttcccaggttggttgggtcgttatagatggaaacttgggctccttctggcacatcatcaactgtttcaataccatcgaccgcccagatgccaatgggttcgacacttaagtagccaatcggtcttaagttctcaccctcagctgtattgtattcatacaagaaggggatgtattggtaggcattggcatccaattcaccattggaaaccgcttcgtttggctgtctaaagtcagacaaaacgacaggttcgatggtgatattttccttctcttccaagcggtcggacacatcgccccaaatttcagcagcccggtcagtgacgaccccaactgtgacattttgggcctcacctgagtcctggtcaccctcttcttggtctgcttcagaatcggcttccgctgaatcttctgcttcctcaccagtatcttggccggtgtcttctgcttctgatccagtttcagcttcttctgtttcagcaggctcagcttggtcggcttcctggtccccattaccacaggcgaccaaggtcaaggatgcagctgctagagtaacaaattttaaccttttcattacttttcctcctagaattcggttaatgaaatctatggtttaggataggcacttttaggagtaattgcaatgaaaatcacaatattagggtcaaactgtgctaaattacccctaaaaccaggctttgaagcacaattttgtatttattttaacttaaaaaagattataatatgacaaatgttatttttaaagatctagctttcaaaccaaaaaatttggctagctttccggccaaaatcctagcttaggcaaagtcaaaaagctagcaaatttttgcccgaatccttaacttagccaaggcaaaaatgctggccgagtctccgggcaacacaccaactgataagaaaaatgaccctggtgagagtctcaccaggggcataggctagcttagcctacaattttgtcccaagccatcaaccaaatcctgttcttgaaaactagccaaagttggctgggacttcatcttcagaccggtaagaaatcgaggtaaatttgttgaactctttcttaaagttcaacttgactgttcctcgagctcctgaccggtttttttcgataatgacttccacgctattatcgacaaagtcctcatcgatatcttcttcattttggtagtagtcctcccggtaaaggaaggccacaatatcggcatcctgttcaatcgaccctgattcccgcaagtcactgaggatgggccgcttgtcttgtctctgttccacactccgggacagttgtgacagggcaataactgggacagaaagttccttagaaagcttcttcagctgccgagatatatcagacacctgctgctgtctggattcatagtttgaagctccttcgatcaattgcaggtagtcaatgacaatcaagcccagacttcccttctcttggaccaggcggcggcacttggcccggatttcagctgtccggatgccgggagtgtcatcaatataaatatcagcttcagacaagctccccatggccacaaacaaacggtcatattcttccggcgttagcttgccatttcggaggttagtggcatcaatactgccttctgaacataacatccggttgaccagctgttcagcccccatctcaagggaaaaaatcgcaatagtttcatctgtggctgtcccgatattttgggcgacattcaaggcaaaagccgttttccccacacccggtcttgctgcgacaataatcaactcatcttcatgaaggcctgaagtcatcctgtccaggtaggggtagccagttgaaatcccggtgatctcttcatccctttggtggagttcatcaatatgctcgatggtttggtggaggatttctgaaatactagcaaagccggtccggtttcgtttttcagaaacctgcaagatcttctgctcagcattgtttaaaacttctggcacatcgtcatggtcttcgtagccagactgggcaatctcattagctgtcgcaatcaagttgcgcaaaagagaccgatcttccacaatcttagcgtaataggacacgttagctgcggttggggtgaccccagcaatctcagctaggtaagaggcacccccgatatcctccaactggtcattggcttccagcttgtctttaatggtaatgacatcaatggcctggttgtcttcatagaggtctatcatggccttaaagatcaactggtgggcccgccggtaaaagtcatcttcatccacatattccatggccgccaccaaggcttctgcatttaagaggacggaccctaagacggattgctccgcttcaatattttgtggtggcaggcggtcttcatgaatattagttgccaaggtcttcttcctttcctggtctttttaagaaacggttacaaatgttccacgtgaaacatttatttttgctatcttaaaaggctgaaacaatcttgcttgcttcagcctctcaatctggcgccaagtcagccaacttacttggcgttgacccggaccattaagcttgctgtaacatccttgtggagtttcacttccacttcttggctaccaatggaccgcatttgaactttttggttgatcttgcgtttgtccaactcgatccctaattggtcatggacatgctcggcaatttgcttggtggtaatggatccaaagagccggccatcttcagcagccttttcttcaatttcaatgggattgttttctaagatttctttttccttcttggcttcttcaaaggcttctttctcttctcgttgacgggctttcttttgggccttcaattgttttttagcaccagaagttgcttctttagccaagccttttttgatcaaaaagtttcgagcatagccatccgatacattttgaatttcaccttttttgccggtacctttgacatcttctagtaaaataacttccatgagcaaatcctcctcttgtctattcaagcagggcctgactcttctagagacccagccttaatcatctaaggaattaataatatcgatcaggttgtctttgacttcttggatggtttggctatcgatttgggtggccgcattggataggtgtccaccaccacccatttcttccattataagttgaacattgattttacccaaacttcttgctgagatgccgactgtgttttctgcccgcttggtaatcacaaaggaagcttccacgtcagtcatattcaacatttcatccgccgtctgggctgccgtaaccggatggtgaatctggtcatcgctaccaaccgcaatagcacaaccatgcttggcaaattcaatggtcttaaagagttcactgcgttccaggtaagtttccttgtcttctttcaagagtctttggatcaaggtaatattagccccaactgactggaggtaggaagcggagttaaaggttctggacccagtccggaggctgaagttgttggtgtcaacgataatcccacccaggagggcagtcgcttcaatcttgttaataggattgccttccactgggacatattcaaagaattctgtgatcaattcagctgtggaagaagcatagggttcgatgtaaaccaagagagggttttcggtaaattcttccccacggcggtggtggtcaatcaccacattccgcttagtcttgttcaataattccggtgcaatggacaaggttggcttgtggtggtccactaagatgacaatatcttcttctgtgattcgctctgcagcttctttcggtgtcacaatattgtcataggtttctgaatatttttccgtttccttgattagtttttgcacatcattagccaggtcattggggttaatcaccacttgggcttcctgttccaacatcatggcaatccgggcaatcccaaaggaagacccgatggcatccatatcagggttagcatggcccataatatagacactgttggcttcaataatcaattcttgcaaggcttgggaaatcatccgtgaccgaacccgggtccgtttttcggttgggttggttttacctccgtagtatcgtggttcataacccacttccttaacgacagcttggtccccacctcgaccgagagctaggtctaggtttttctgagccaagtcagccaggttattgaaggaatcttccccataggccagcccgatggaaatggttagagggacattgcgcttagaagttcgttccctgatatagtctataatattaaatttgttctcttcaacagtcttcagttcactgtaacttaagataatcaaaaagcggtcgctagatgtttttttataaaaaataccattatttttagcccagcgagacaaataagtggtcagcaaactatccaaggccgaaacttcccggtcatccaagtctttaacagcttcgtcatagttgtccaagaaaagccagccaatgaccggcttgtaatgttcatactccttcttcacggctacatattctgtcacatccaagagataaacagccttcaagcctttttggatctcataatggtaggttttttcgccccaatcgatcaaaccattctggtccaattctttatctgacacaatcttatctaatatggattcatgaaccaccccaatagacttgccgatcaagttgtccacatcattgacataattttgcatataggggttgatccactcaatttctaggtcatcgttgtaaaggataatccccatgggcattttgataatggcttcttgctccccccgtttaatacggaaggacaagttcataatatattcgtctagtttttcatgatactggttaacaaagcgaaagccaaagccccaggcaattaaaaaaacgacaaccattataagaccttgccaaacacttccaatgaaacttagtaaggttaagataatatgtgcgacaaaagtaatcgtaataattgtttttaacgattttgagccgaataaaaccggcattcggtcgctatggttagaattttccatatgtactcctttaatttagcttttaactacttcatattaacatgaatgggtcaaacaagctaggaatttgaggccagtctcaagccggcaaaagccagaatttaactgctttcaccccgtcttttggacatcttatcagtccaatctttatcgataaaaaagactgccaaacttcatcagtcttggcagtctattgcttttatcaaacatcaatgcactctagcaaaaaagactagttgtcttccgcaacataaggcagtaagcccataaaacgtgcacgtttaattgctttcgttaatttacgttggttttttgcgtaagttccagtaactcgacgaggtaagatttttcctcgttctgaaatgaaacgtttgagtaggtctacatctttgtagtcgatgtagtcaatgtgattagcagcaaaaaagtcaacttttctacgtcttcttcctccgcgacgtccagccattttatccgcctccttttcttagcttgaatcaaatcttaaaaaggtaaatcgtcgtcactaatatggattgaatcatcatcagcttcaaagggatcttcatcttgggaatcattttggtcaaatggattgtcgccttgaccaaatgaattgttgttttgtccctgattttgattgaaggcattagagttttgagtgttgaaagattgattttgaccttggtagttgcccccagtttggccgctttgagaacgacggctatcagtaactgatttcggctccaacatttggaagctttcaacaactacttcagtaacgtaaaccgtccgcccttcattattttcataattacgggtctggatccggccaacaacccctaccaaggaaccttttttcgtaaaactggcgacagtttctgcagttctacgccaagcaacacagttaataaagtctgcgtcccggtttccttggctatttttaaaggggcggtctgcagcaatggtaaaagatgtcactgctgtcccgttacctgtatatctgagttcagcatcacgggttaatcttccaactaaagtaacattattgatcaatccacttactcctctctagggataattgttccacgtgaaacaattattttgtatctagacggacaaccatgtgacgtaatacatcatcattgatgcggactaggcgttcaaactcgttaattgcatcgacttggtcagtagtgaaggttaccaagtggtaagttccttctttgtaaccttgtatttcatatgcaaaacggcgcttagcccagtctttagattcagaaatttcagctccattgtctgacaagatagtgttataacggtcaattaaggcctttttactatcttcatctaggtcaggacgaataatatatagaatttcatattttgctgtctgattcatttgactgacacctccttttggtcttttggctcaattcattggattgagcaaggagagtaatgtttaattttattactcactcagaagattataccacaggactagacgggtatcaaaacttttttgttatttttcatttttaaagcaaattaggcagttgaaacttgttttgacaaaaacatgactacttttaacaattatggtaataattagacaggtagaatgttgtcacataaggacttcttcagaatagtctgtccaggtcttgtctaggttagtctaaaaattaactgattttgaccttgattgaccagtttatcaccagattgattcttggtaaggctagtcaaaaaagctgtcaaactctctcgtgaaagtttgacagcttattaaaatgttttttgaatctaggcattaaagcttattcctcaacggtttggttaacttgattgtcaagctcttggtcaatatcaatgagggctaccgttgacacccggctatcttcttcaagtcgaattaaacggacaccttgggttaggcgggaggtctgagagatgctgtcggcttcgatacgaatcatgataccttggtcggtgacaatcatgacgtcctcaccaccagagacagttttcagtccaattaggggaccattcttatcggtaatatgaagggttttaacccccttgccccctcgcttgtggagggtgtactcttcttgggaggttcgtttgccgtaccctttttcagtaatgactaatacgtcttggcccggctctaagacttccatggcaaccactgtgtcgccatcacctaagcgaattccacggacacctgcagcccctcgacccatgctacggatatctttttcatcaaagtagaccgcatagccttgctggctggccaggataatggcctggtcattgtgggtagggaccacgttaaccaattcatcgccttcatttagattgatcgcgttcaacccgctacttctgatattttgaaattcagactgggccgtccgtttgacccggccaagtcttgtcgcaaagaagaattggtcctggtcatctgcctggtcagtcaagttgaccatggcttgaatatattcatctttatctatatttaaaaagttgatggcaggaattcccttggcattacgcccatattccgggatttcgtaggccttgatcttataaaccttgccttggttggtaaagaagaggatttggtcatgactagaacagaaagtcagctgttcaacaaagtccccatcgttggtagtcatccccttaaccccacggccaccgcggttttgggccttgaattctccagccggcatccgtttgatatagccttttcgagacagggtaatgatgatatcttcttcttcaatcaagtcttcgtcttcaatgctcaactcttccccaacccggatgtcagttaggcggtcttggccgtgtttttcagcaatttcgatcatttcttctttgataatttgcttgatccgttctggccgggccaagatgtcacgcaagtcctcgattttttctaagagttcagcgtattcatcttcaattttctctctttccaaaccagtcaaccggaccatccgcatgtctaaaatcgcctgggcttgacggtcagagaggtcataagaagccatcaattgacttttggcttcttcagcttgctgggactgacggataatggtaataatggcatcgatatggtctaaggcagtccgaagcccttctaagatgtgggcccgcgattcagccttgttcttgtcaaactctgtccgcctgcggataacagttttttgatggtctaagtagtgggtcaggatgtctttgaggcccaaggttttgggcaccccatcgacgatagccagcatgttaaagccaaaagaaacctgcaattgggtcattttgtaaagcttgttaagtaatataccagcagaagtatcccggcgtacatcgatcacaatccgcaagccttcccggtcagactcatcatttaaatcggtaatgccgtcaattttcttgtcccgagccagttccgcaatcttttcgaccaatttggccttgttgaccatgtaaggaatttcgtcgataataattctttccttacctttttggtcgacatcgatccgggacttggcccgtaatttaatggacccacgaccggtctcataagccttgcggacgccagaaacaccaataagggaagccccagtcggaaagtcaggtcctggtaagacttccataaggtcagccacagtcacatcctcattttccatcaagaggacgcaggcatcaatgacttccttaagattgtggggtgggatattggttgccatcccaacagcaatccccgaagccccgttgactaagaggttggggaagcgggcaggaaggatatcgggttccgactcagtcccatcatagttatcgtggtagtcaatggtatccttgttgatgtctcgcaggagttccaaggccatcttggacatccgggcttcggtataccgcatggcagcagctccgtccccgtcaaccgacccaaagttcccatggccgtccactaagggaactcggtaagaaaagtcctgggccattctgaccatggagtcataaatagcagtgtcaccgtgggggtggtatttccccataacatcccctacaatacgggcagactttttataagacttgtccggggttaagcccagttcattcattccgtacaggattcttcggtgaaccggcttcaagccgtcccggacatcgggtagggcccgggagacgatgacactcatggcatagtctaagaatgagtttttcatctccttggacagcttaatctgttctaaacggctatctctctcttccaaaaacaatttcctcctttaacagctttggacaaggctagatatcgatattttccacgtaacgggcattttctttgataaagtcgcgccggggtttgacatcctcacccatcaacatgtcaaaaatagtgtcagcctcaatggcgtcgtctacgtctacccgaagtaagcggcggtgttctgggttcatggtggtttcccacaactgctcagcatccatttctcctaagcctttgtagcgttggacagaaggcttgggtgagtcaggaatttctttcaagtaggagtccagttcccggtcactatcaaagtatttaaccttcttgccttgcttgacctggtagaggggtggctgggcaatgtagacgaaacctgcttcaatcaagggccgcatataccggtaaagaagggtcaagagcaaggtccgaatgtgggctccgtcaacatcagcatctgtcatgataattaacttattgtagcgagcttcttcaacattaaattcttccccgaagccagttcccatggctgtaaagagagaccggatttcttcattggctaagatacggtcaatgctggctttttcgacattcaaaatcttaccacgaatcggcaaaatagcctggaaaacccgggaccgaccttgcttagccgaccctccagctgaatccccttctacaataaagagttcggattcttcaggatctttggaagaacagtcagctaatttacctggtaggttgctaatttctaagcctgatttcttccgggtgacttcccgggctctcttggctgcttggcgggctttggaagccaaaagcgccttgtcaacaatccgcttaccaacctttggattttccatgaggtaacgttcaaagtgctggctaaagagccggtcaattatccctctgacttcagagttccccagcttagtcttggtttgtccttcaaattgggggtctgggtgcttgattgacaaaaccaccgtcagaccttcccgaacgtcatcgccggtaaagttatcctctgactctcggagcaagttattctgccgggcatagtcgttgaccgcccgggtaagggctgtcttgaagccggaaatatgcatgccaccctcataggtgtggatgttattggcaaaactcattaaattagtatggaagctatcggtatgctggagggcaatttccacagaaatcccttcttcttccccttccaagaaaattggggtctcataaagaacttcacggctggaattcaagtggtcaacataactcgatatcccaccttcatagtggtagttcaaagactgcccgcctgcttgccgtttgtcttcgatggaaatattcaagcctcggtttaagaaggccaactcccggatccgggtggctaaggtattgaagtcataagaagtagtgtctttaaaaatcaaactatctgccttaaaggtaacaatagttccagtgtggtcagtctcacccaccacttccaagtcagaatcaaccaagccccgcttgtaaacttgttggtagattttaccatctcggtgcacctggacttggaggtattcggagagagcattgaccacagaagaccctacaccgtgcagaccaccggaaaccttgtaaccaccgccaccaaatttcccaccagcgtggaggactgtaaagacagtttcaacagctggccggcctgttttttcctggatatcaaccgggatgccccggccgttatcagccacttggatcacgtcgccttccaaaatggaaacagaaatcttgtcggcataaccggccatagcttcgtcaatagcattgtccacgatctcccataccaagtggtggaggccttccttgctggtggacccaatgtacatacccggccgtactctgactgcttctaggccttctaagacttggatttgactagcatcatatgtttttttcagttctgctaactcatttggtgttaatggtctatcttcagccattacacgtcacactccttctatggtctgcctggacactagtgtcaatcgcttcactcgccctgtccacggtcactgtcaacagtcacttgaccgcttgtcaccgagtaaattttcggttggtttaaaagttcaattttgacaccttctagactggttgttgttaaaaaaacttggactttattttcaatggtttttagcaaatgggtttgacggttgtcgtccaattcgctgagaacatcgtctaaaagcaagacagggtattctgaggttttgtccttcatcaagtcaatctcggccaacttgaccgacaagctagtggtccgctgctggccctgggacccataagtttggacattgtgtccattgacgtaaaaggctaaatcatctcggtgggggcctactaccgtggtctgccggcggaattccttgtcctggttttggtcgtacaagtctaaaagattagagtagatggactccttttgactcagattgtcatcttggacgctggtttcatacttgactgtcaactcttccttggactgggaaatattggcctggataggctgggccaaagcttccaagtccttggaaaattgcttgcggtcataaatcacttgactgcctgcctgggccaattggtccgtcaaaatttccaggtaaagctggtcaaattttttgggctggttagacagcttcaagtattgattgcgctgtttaagaaccctttggtattcgaccacctggtggagatagattgggttcatctgacccaattcaatgtcaataaaccgtcgcctagtggctgggggacccttaactaattccaagtcttccggggcaaagaggataatattcaaattcccaatatagtgactcaacttattttggtccaagtggttcattttagcttgtttacctgttttggacactgaaatctctaagggataagagttgtggcttgtccgaaccaagcccttgacccgagtaaagtcctcatcccacttgatcaattctttgtccttggctgtccggtggctccgggccaggcccaggaaataaatgctttccaaaaggttggttttcccttgggcgtttgcaccaaggaagacattaaccccgggggaaaactgtaaattggcctcctggtagttgcgaaagccctttaattcgaggtcgtccaagatcatctggatcacacttgttgggctgattcaatttgaaagctagcttggatagccggaatttcgacaaggtcacccgggtagaccttcttgccacgtcggtcttccaagtccccatttaaaaagacctggtattccgctaaaaaaggcttggccatgccaccactgctgataatatcggtaaactttaagagctgggctagggttatgtaatccccatcaattgtaacagtctcaaaagccacagggttcactccttatattcaggctaaaataaagacgtggaaaaaccacgccacactttcgtcttcctttatcattataccataattccccttaaaaagccataaatggggcgatatttatccattttggcctttttaccgcctagctaacttttacccctcgcaaaggttaaaaaggacaataaaccataaaaaaggcgggatctcttggagatcccgcctgaaggcttggttaatggacttaggctgttcggattggagtaataagttggataaagtctccttggtcctcacttgggacgatgacaaagggtcgcaaggtcgaaactaatttcaacttaatttctccttgaccaaaggtagccaaggcctcttttaagtagtcggggttgaaagaaatggttaagtcttggccttggaagtggccaaagtcaatttcttcttggacatggcccacttcagctgactggccttcgatttccaacttttcagcagtcactgtgagttggaccacattgtttttcccttcatgggagaggagggaagcccggtcaacagccccctgtaattccttggtgtccaaggtgatttccgttggggtgtcgcctgggatcaagcggtcggtatcaggatacttaccttctaggagccgagagtaaaactggctgctggagagggcaaataggatttggttgtcgctgatggctacccggacttcttcatctgcatccatcaacttagtcagttcagtcaaagacttacctggtatcacaatgtcaaaggaaatatcaggcgctgactctaattggatggaccgttgcgacaaacggtggctgtcggttgccactgccttgagtcggccctctttgagagataggttaaccccagttaggatgggccgactttcatggttggagactgcgatgacagtctggttgatcatgtttttaaagaggtcaaccggcagggtaaaggattcctccaggtcgatatctggcaagtgggggtaggacatggcgtcaatgccgttgatagtaaaggaggctgaagctgaggtgatttgggtttgctggccttggctaacgtttaccttaaagtgggtgtccggtaatttttggacgatattggcaaataaccgggctggttgcaagacaatctgccccggctcatcaataaccaaatccgccccttcatcggtcacagataagtaactttcaactgagatatccgagttagatccggttaaggttaaaccctggttatccgcttctaatttaatcccggtcaagatagcgatggtacttttagaagacactgcaatctgtactttttttaatacttttagaaattccgtccgttttactgaaaatttcaaaaaaatccctccaaacttccttttgttcttaagtataccatagatggtttttgtctttctccatttcaaaaaatgattaggtctttatctatttatatataataaatgattagtattagtagtaggacctgtggataatggggaaaagtttactgaagttcgcctttgaaccaatccacatgtggataaagtgtggcaaagtatgtggataagctgaggacttatccacaagacttctacaattgtttttccaagtcagcgatatcctgtttgagatcggggtcttctttcatcaatttttgaattttttcgtgggcatggatgacagtggtatggtccttgccgccaaattccttaccgattttgggcagggagctagtggtgtattcccgggataggtacatggctacttgccggggaatgacaatgtgtttggtccgttttttccccttcatctccgccagggtaatgccaaagtgcttgcagaccttttgctggatggtggggatggacaagttttctttcttgtctactttaaccatacttttcaaggcgtccgctgccaggctggtggtgatatcgctttgttggatggcagaaaaggcctggacccggaccagggccccttccagctctctgatgttggagtcaatttgccctgcaatatagctaagagtttcgtctgggatttccagtcgttcagcattggccttcttccttaagatggcaatccgggtctccaagtcagggggagtaatgtcaacagacagaccccaggcaaagcgggagaccagacgttcctgaagcttgggaatttcgttgggcaagcggtcactagtcaaaacaatttgcttacgcttgtcatagagctcgttaaaggtgtggaaaaactcttcctgggtcccttccttgtcggcaaagaactggatgtcatcaaccaaaagcaagtccacattccggtattcttggcggaaactctcctgggtccggtcctggatagagttaataaagtcgttggcaaaattttctgaggtgacatacttaacattggcttgggggttgagctggaggtattggtggccaatagcatgcatgaggtgagttttgcccaaacccacgcccccgtagaaaaagagggggttgtagatggtcccaggctcttcggaaacaactaaagctgcggcatgggccatctggttgcccttgccaatgacaaaggtctcaaaagtgtatttgtcatttaaagaacttggcttaaaggcaggagggcggctgtcttgcttttggttctcgagctgggtctggtccatttgggcttggttttcatcttcggtaacaaagcggggggtcatttccttgccaaaatactcatagaggtattggactgtctgattggttaaattgttttcccaatagtccttgtgcaaggtggattggacttggatggtcaccgtgtcctggctgatgtcgatcaagtcggctgagtttatccaggcgtcaaagctaattttggcgagagaatcttgaaacttgtctcggataaaagaccataattcttgcttgtcggtcaatcttcttcctcctgacaaaaaataatatacaccaaattttaccacgatcgcttggagttttccacagatttaaaaaaagtggataaagaaagtcacaagtgtggagaaaaacttatccacacgatctgaatttctgtgtataaactaaaatgttttcggatttcctcaagaactgtggataattaagaggttaaaaagcttattatagcagtaaataaaggcttatccacagaaatggaaagttaatcacaaatttctatccctccttgaggacttgtggataaaaactggaaaatcctgtggttagaccttaccgacaaaattttttccgcaagcttgtggataaaattgtttaagaagagtcaatttttgacctgacttttgtaaaatttccttgacattccagtaaacattacataaacttgtagagtcagtctatctattgaataagaaatgattgaggctttttaaaagcaaaattgattcaggaggtgttttcaatggctcaaggacttacatttaaccccaaaaaacgaaaagggaaaaagaatcacggtttccgtaaacgcatgagtacgaaaaacggccgtaaaattttaaaaaacagacgccgcaagggtagaaaacgtttaagctactaagttgaatattggcttaaagcataagataagctgcgataggcgacgacatccaaggatgggatgaaggtcgcctatttttttaaaccaggagactgggcaatggactgcattagaagataggagggcgaatttcatgaaaaaagcttaccgggttaagtctgacaaagacttccaaggggtgttccaaaagggcaagtcattcgccaaccgtcaatttgttgtctacgtcttggccaagccggaccaagaccacttccgcttgggggtatccgttgggaaaaaaattggcaatgccgttattcgcaaccggattaagcggaagatgcgtcaggcagtctttgaattagaccaagcaggcttgatcaaggattcggtcgactttgtggtcattgcccggccgcctgccaaggacatgagtgtggaccagtgcatcaagtcgttaaaacatgtctttaaactggcccaactacttcaagattcacctacataaggctataatataaaaaagagaggaatagcatgattcaccaattaaagaaacacaagcgattaatcttaactttggctattgtgtcattggtcgtcctattaactgcatgtggccaggaagcccggcagaacttagaacccattggccccaatagcgaaggtttttgggaaggatttatcctatacaacttctcccgctttatcatttgggtctcagagttgtttgggggcaactacgggattgggattattgtcattaccattctttctcgcattttaatcctgcctttaacccacctccaaaacaagaatatgaaccagatgaatgacctccaaccccaaatgaaggccctccaggagaagtattcagcccgagattcagaaaccaagcagaaactacaagaagagcagcaaaagctctatgaagaaaatgacgttaaccccctcatgggctgcctacccctactggttcaaatgcccatcttcattgccgtctaccaagccgttagccggactccacaactggcaaccgagtcttttctgtgggttaacttaggggagccagacccttattacatctttccaattttggccggtctttttaccttgatcaactccctcttgatgcagtacggccgagaaggagcaggcggtaaggtgatgagctttattatgcccctctttattatcttgattactttccgcctctccagtggtcttgctttgtacttcaccgtctccaacatttttggggtcggccagaccttagttttgaacaaccccttcaaacggaagcgggaacaggaagaagctgagcgagcagagaaagaaaaagctcagcggcggaagagagccattcgcaaggccaaaaaagaaggcagaaatgtaaaaaaataaacatttaaactttttgtcaaaatttggtaaactaaaagggtatacaggacttagacaaggcttgtgaaagattgccaacagatggcgatggatggaggaaatgaaatgattgagaagtacactgcccaggcaaagacagaagaagaagcaattgaaaaagggctaaaagagcttggcatcacccgttctgaagcagagatacaagtcaatactccggctaccaaaggatttttgggctttggagccaaggatgctgtcgtcacagtaaaacgcaagggaaagtctcaagttgaccaagtcctcgaagaaacggttcctaaaaactcccccctccaagatgccagtgctagcttggatgaggaagcaggtgacacaaaggatgcccctagttcaagccagtttcaagctgaccttgaaggccctgaacaagatacaggtgaccaggctaagtcaagccagtctcaagtcagtgaagcagactttgaccaagcaggttttgaacaagctgactcaagcaagtcagcccaaactacttctggccaggctagcccagcttcagtaaaaccactaactaaccagacccaagaccaagattcagaaattcaagtggaagggcaagcagacaagggaccgcgaaatacccggtcacgccaagatgccttcagccaggttcccatccaggaaaaccaggaagaccaagaggcgattagctttgtcaaagactacctcttaagcattattagccatatgggggtagatgatgtcaccatcgaaaccatccaggaccaacaatttatcaagtatgacattgatacccaggatgccggcttggtgatcggtcgccacgggaaggtcttaaacggcttgcaaaccctggcccaaatccagctccaccagcgggctgacaacaaactccacgcccatgtggatgccgaaaactaccgcagccgacgtaagggaacagtagagcacctggctaagaaaacggcccagcaggtcatcaacaccaaccagtccgttattttagaacccatgccggcccatgaacgtaagcagatccaccgccagcttagccgctacagtgaggtccagacccactccgaaggcaaagaaccccatcgttacttggtcgttgagcccaagcaggtttagcagtaaactagaaacagaaagatacaaagcagttattagtcaataactgcttttttaggagctttgcagatgaattggaaagaaaccatcagtctcatcaacaccacccgggggaccggagacaagaaaaatttgaaccggatgcgacttttactcaaagagctaggtaatcctgaaacagacttgccggtcatccacgttgctggcaccaatggcaaagggacgacctgtgcttatattgcccacagcttggcccgtgctggttataaaacaggactttacaccagcccccacctggagcgggtcaatgaacggatccggattaatgaccgctacatatccgaccaagacttaatggctttgaccggtcaaattgcccccatcattgaccatctagaagactgcttgggtgagaaatactattcttttgaaattttaactgcccttgccttcttgtacttccagcaagcaggggtggactttttagttttagaaactggggtagggggaaaaattgatgcgaccaatgtggtgcccgctccactggtctcagtcattatctctattggctatgaccacacccatgtcttgggtaataccctggaagacattacccggcacaaggcagggattattaagaaaggctgtccggtggtggtgggccctcttgccgaccatttattggctattgttaaagaggtgtccaaagaaatggacagtaatttaaccattgtccatcccgacaagtttgacattgttcatcaaacccttgactaccagtcctttaaatacggtggggacttggttttagagactcaaatgattggtaaccaccagctggtaaacactgccctagcttatgaagccttgaagattgtccaacaatcttaccccgatttgacagatttagatatattagaaggcttgaagacgacccactggccaggccggatgcaaaagctatctgaccagccagtggttgttcttgatggggcccacaacgaaatcggggtcaaggctcttagacagtcaattgaccactttttccccggcaaaaaaatcacctattttgccggaatgatggtcgaaaaagacttcgccaaaatgtttgacctcctgggggaaacagctgataaattttacttgatttcacccgatttgactcgcggttttgatgtcgaccaagccgttcaatctttgactgacaagggctaccaggcttccagtgtggctagcctccaagccatcttagactacataaaccagcaagcaaaagcagatgaaattatcattatctttggctccctctacttggttggcgacttcctaaaactttaccatgaagcatccggttaattaagattaaaaaagctctcgagatgagagctttttttggttaaattgagtggacaagttttgagaattgacaaggctttgaaccgcttagactcctagatattaatccttctataggtcatttaataactgattttcaataacttggtgatcagggttaaagtcttctgtttgtaggtaatagttcgctgaatcaatgagggcctcagccggggttaggcccacaatttctgttcctaggatgccaaccccgtagcgtttagcttcgaaacggatggtttctagcacccggtagaggggggttttcttgtagttgaccatattcatggaaacttgggcgacttgccggtcttccaacatcaccccgatggccttgcagtatttgaaaccaccagaagacccacggacgatcttggcaattcggttggccaggtcaatattgtcggtatccaggttgacattaaaggccactaggggcatgcgggctccaatagcagttgctcctgctgttgggtggacttggtctgggccgtagtctggttgccacttgtcttttttgatcttgtcggccatgccttcaaactcccccttgcgaatcttggcaatattttttcggtggggggctgtggctgctgcttcatataagaaaatcgggatgtctaattcctccccaactcgtttagcaatttcttgggccaggtcgacacattcttcgatactggtatccttgagggggatcaagggacagacatcggttgctcccatgcgtgggtgggcccccttgtgttgggtcaggtcaatatggtctttggcgtatttgatcaggtcaaaggccacttctttaatcgattctggcccccccaccaagctgaggactgtccggttgtggttgctatctgccgagtagtccaagaggctggctcctggtgtggactgggcaagcctgacgaggccagaaatgatatcttcgttaaccccttcgctaaaattagggaccaattcaatgacttgagacatgaagtatcctcctaaactttgttcagacttttacatttagcttaccagttgcccggcaaaggtcaagccatatgcagggcttggcaatttgacctggttttggtaacccttttaaaaaatcaagccatatgcaggaacttggcaagcatggtcaacttggctgcttctctgtttaaaagatcaagttagatgaaagagtttggcaacttaagccaatttagtgcctctcctataaaaaatcaagccctttgcaaaaaaattccccctaaaaccaagtcttcaaacctccttgaaaacccaaagataagaagctttaagtgatctgcaagcttagacataaatccagccccagctaaagttaaaaatcagtcccagcctcaaagctacttattacaaaaatctataagatataacttgtaaaaggcttacattttcagtatatttaaggcactaaggcttttgccagaagaaagatacataggaaagcttataggaggggtttaaatggcagattttagccaggatgcaaaggctctgcttgaattaattggtggtcgtgacaacattagtgccgtcacccactgtgccacccggatgcggtttgtactagtggacagtgacaaggcggatattgataaaattgaagacctggaatcagtaaaagggtcctttacccaagctggtcaattccaggtcattattggcaacaatgtgtcggagttctacaatgaatttgctaaaatgtcaggggtggaagaagcctcaaaagatgatgtcaaacaagctggtaagtccaatatgaactggctccaacaattgatggctaacctggcagagattttctctcccttgattccagccattgtgattggtggtttgattttaggtttccgtaatattattggggagattcaaatggacttcctgggaggtcaaaccatcgctgaaagctcccaattttgggctggtgtttttgacttcttgtggctgccgggtgaggcgattttccacttcctgccagttgggattacctgggccattacccgtaagatggggacgacccagattttagggattgtcttggggattaccctggtctccccccaactcttaaatgcttacgaggtcactgaaatcattgctggagagggtgaagtttggaactttggcttctttaccttagataagatcggctaccaagcccaagtcattccggctatgatggcgggctttatcttggtctacttagaacgctttttcagacgggtggtcccagaagccatttccatgatcttcgtccccctcttggccttggtcccaaccgtctttatcgcccacgctgtcattgggcccatcggttggaccttgggtacctggctagcccaaattgtccaatggggtcttagcgggtcgcttaactggctctttggctttctgtttggtggcttatatgcccctcttgtggttaccggtctccaccacatgaccaatgccatcgacctccagttagtggccgaatatcgtcagaccatcctctggcctatgattgccttctccaacattgcccaagggtcagcagtcttggctatctatttcaagaaccgtaaagacaagcaggaagcctctgtctccttgccggcagctatttctgcctacctaggggttaccgaacccgccctctttgggattaacatcaagtatgtctatccactggtggctgggatgattgggtcagcctttgccggtttgtggtcggtcctgtcttctacagcagctaatacaattggagttggtggtttgccaggcatccactcagctgccactggttcctttgtttccttcgccattggcatggccattgcctttgtcgtccctattgtttgtgtgtttatttttgaaaaaacaggtttcttaaccaaacaaaaaattgaagggatcccgattccaaaacttggtcgttaaggtaaacattcggtctctggcccagccttgtgccaggggcctttttgtcagaaaggatgatgaatggtgaaagagtttaaagatttggtggtctaccaggcctaccccaagtcctggcaggatacgaccggcaatggcaaggggggacttaaagggagtgacccagcgcctagcctatttagctgacctgggcattgacctgctatggctcaaccccttctacaagtcgccccaaaaagataatggctatgatatttccgactacaagtccattgacctcgactacgggacctgggaagacttggatgaattagtccaaaaagcaggcgaatacggaattggtctcatgtttgacatggtcttaaaccatgtttcgactgaccatgactggttccaaaaggctgcacaaggggacccctactaccaggacttcttttacatccgaccagccaaggatgacggcagcctacccaccaattgggagtccaagtttgggggaccagcctgggcaccctttcccggaagtgatgattactatctctgcctttatgacaagagccaggctgacttaaactggcacaatcccaatgtccgacaagccctctatgacgtggtcaacttttggattgacaagggggtcaagggtttccgctttgatgttttaaatgtgattggcaaggaccttgacctcaaggatgccgaggatggggtgggcaagaaagaatacaccgacacccccattgtccatgaatggatacaggagttaaaccgccacacctttggccgtcgtgacgacctggtgacggttggggagatgtcttctaccaccatccaagacagcattcaatactccaacccagactatcaggaactggatatggtctttagcttccaccacttgaaggtggactacaaggatggcgacaagtggaccttgatggactttgactttcaagagttaaaaaggctccttaacgactggcaagtaggcttgacccagggcgggggttggaatgccttgttttggaataaccacgaccagccccgggccaatagccggtttggtgaccccgaaaattacccctatgaaacggccaccatgctagcgaccaccatccatctcttgcgagggactccttatatctaccatggggaagaaattggcatgactaaccctaactttgactctattgacgactaccaggatgtggagtcccacaatgcctatcaaagcttagttgaaaatggccaaggcccagaccaggccctggccattatccaggacaagtccagggacaatggccggacccccatgcagtggactggggaagaccaggctggctttaccagtggccagccctggatcaaactggccccaaactacaaggaggtcaacacccaggttccagaccccagccaaaagatttttgcctactaccagaaactgatccgcctacggaaagattataaagtgatcagtcacggcgactaccaagggattcaactggaccacgaccagatttttgcctactccagagactaccaagggcagagactcctggtcctcaaccacttctaccccggccaggctacaattgagttggatgatggcttgttgagtgggtccagccgggtcttgatttctaattctggcgactggaccttagaaaagaactttaccatgggcccttatgaatcacagtggccttcttgcttgaataaggggttaaaaagtttgaaaactggcaaggcagcctcttggcatgtctagggcatttacggtatagtgaaaggtgacagtaaacagggggtaggcaaatggaagcagaatacttaaacttaatgaaaaaagtgatggaagaaggcagtgaccggggtgaccggaccaaaacaggtgtccggtctctcttcggctaccaaatgcggtttgacctgtcccagggcttccccctcttaaccaccaagcgggtcgcttttggtctggtcaaatcagagcttctttggttccttaaaggagacactaatatcaagtacctcttggaccacaagaaccacatatgggacgagtgggcattcgaaaattatgtccagtcagaggactacaagggccctgacatgacagactttggccggcgagcggtgacagatccggaattcaaccaggtctaccaagcagaaatgaaaaagttcactgataaaatcctggccgatgaagattttgcccaaaagtatggcagcctaggcagtgtctatggagcccagtggcggtcctggcggggggctgacggccaagtcgtcgaccagatcagccgggttatcgacaacatcaagacccatccggaatccagacggcatatcgtctccgcctggaacccagcagaagtcgaccaaatggccttgcccccttgccacaccctcttccagttttatgtcgacaagggtcgtttgagctgtcaactctaccagcggtctgctgacatcttcttaggcgttccctttaatattgctagctacgccctcctgacccacctggttgcccatgagtgtggcttggaggttggcgactttgtccacaccctgggggatgcccacatctacagcaaccacttcgaccaggtcaaaacccagctggaccgagacccacgccctctgcccaacttggtcttaaaccctgacaagaccagcatttttgactttgacatggacgatatccagctggaaaactaccaccctcacaagggcattaaagccccaattgcggtctaggctagccctctaattataatgcaagagacctgctcaaacttggggcaggttttttaatcggattaagcaagaagtcaaatgaatcgacaaataatagaagtaagctagtttttgtgctaacttaatagtgagactaggacgaaggagctgaggctggatgaaagggaataaagttttacttgttagcttgtatattgttgctctattgaattttatcatggccttcactgggtctcattccactatgaatattgctataggcctcgcttgtctagcagttgccttggctgaaagggataactagtcttaactggggaggggtgtttgcctgtgaagcagagtaccgtcttaagaattgtcatctttttcatggcccttgtcgtcctcgccttcttgattttccctgtccatgaagggcttgtcagagcttcagtcttgatcttgatcggaaccactattgtcagtgaatactttataaggaaggaaaagaaaggtgactgattcaaaccagcttttagactccgtttataaacaatacgacgacttccaactctccaatatcaaccttgccctgaccaagggagagatcgtgggggttattggcccaaatggatcaggcaagaccagcttgttaaaggtcttggccggccaaataccagtagactcaggtagggtcagacccttagccaaggaagacttggcctttgtctttgaccaaaacaagttacttaatgatttgaccctttcggactaccaaaagatcttcccctccctctttcaccattgggagagccagacctttcaccactaccttgactattttggcctcccgcggcagaaaaagctcaaacagttttccaaaggaatgatcaaaaaattgaacattagccttgccctctcccaccaagctgactacttgcttttggatgaaatcaccagtgaccttgacccctttgtccgggaagaagtcttgagtgtcgttcaaaattatgtcactgaccgtcaagccgtcgccattttaaccagccatatcctagaagatgtcctgtccatcagtgacaaactgctggtgatgaaggctgggactattctggctaagcgagcgaccagcgactttcagacggtggaagagttaaaggcctatttaaaaactattttatgagggcggtttcacatgaaaggactccttatcaaagacctattgttaatgaaaaataagctgggccagggtcgaattttactttttattttggcctatatcctcatctcagccctggtatttaccgacctattctttttactgaatatcttcctactctttattttgatgaacacccaaacccatgtctatgtccaagaccaagaatcgggtttcttggaatttctccatactacgaccgacttgtcagtcaggcagaccgtcctagcccgttttttatcgtccggtattttctctcttgtcctcattatcttcttctttcttttatttgccggctttaacttccttgccggtttatttacctggctagaaatgctggttatttttgcagtcctcttggtcttctccctagcctatatcctcttgtccatgccctttctttacctattcctggaaaatggctttgtcatcttgttaatcttcctagccatcctcctggttttagggacgactttgttagaccttctcggacctggttttatgatcagactagcaagcttgcccactgccggtttggtaaccttagcagtactgtttggcctggccctctttcccctgtccttttggctctccttggtaattttaaacaagaagatgaaagaaacctaaagaagtctgcaaaatattttagaatgaagcgaaaaaactggctgacaatagaacaaaatagggaagttttgcagttgaaactggacaataaatcaaaataaggaagttttgcagctgaaactggacaataaatcaaaataaggaagttttgcagctgaaaggcgacaatgggctagccggctcggtcttactgaacctgcatgagaattgggggacctcagaattatccatttttacggaaagcttgaccctttaaaacctgcctccctctggaaaaaagccaccttataatatctgttactatattgtagaatttacacttagatttggactgactctttattttctactaaatgaatattgacttgtgagaaagatgaaacttggttcttataatctgattgatggcaagtattccacgatagaagtattacaataacggacactagcaaaataataattacttttctatgcttattcatagaggatgccttcttccaatgtatataatttgttacattgacttgcaatatctatatcatgagtaacgatgatcattgacatatggctatcacgatttaattctaataagagatcaataatccccttagctgttctttcatctaagtttcctgtgggttcatcagctaagaggagtttaggtttggaagcgatggccctagctatcgctatcctttgttgttcaccgccggataaagttgtgaccctactagcttctcttccttcaagtcctactgaagcaagggcttgacttgcaatcttttccctttccttctttttgatccccctgtagcctaaaggcatttcaatattttgtaagacatttaaatcattgattaattgaaaattttgaaatatattcgctatatggttagtcctggttttgaatagctttttggcttgtttaccggatagactttcgcctaaaaagttatattctccactatattctgtgtccaggagagagatgatatttaacagagttgttttgcccgaaccagatttgccgactatggcaaggctctgtccatccgttagagataaatctacgccttttaagacatctattttcttctctccgtcttgaacagtcttggttagcccttttagttctactattttcatcttataccccctatgaatagatcttttcccactcaaagccacgactggcaaaaatagtaatgccgaaggaaaccaccaggcaaaaaatgcttaatcctataaaagagttaatctgtggtcgaataaggtaatagggtgaagacaaaatcgactcaaagagggttgcacatacttgactgacaatcattgagacccacatgataaaaaataattcaagaaaaagttggattctcaaacgaaaaagacaagctccataaaaatattgaattttatttttttcctttctttccttaacaaagatgaggaacatactggaagtcccaaaaataacaataagaatagctattgttgagatccaagcaaataagcgtacaaaagctgcttgactgttgctccctttttcaaaatctgctagtaagtccgtgacatagacctctctattaagaagttcggctaagttattttctatactcggttgattaggaacattttttaattttaaaaaagtttgatctgcttttcccacaatagttggttgcatcagaacaaagactgactcccttatctgaatgtcgccgaattcaaagacattagtcggaatggcttgtttatagcttgttttattggctggcaaatcttccaggtttaatttaagattatctagaacaagagtgtcattttccagtcttatcccatcatttaacattcctttattcctcttaactttttggttcaagttctgacttaaataggccgaattcttgtcaggacttatttttaatatatctgtgaaaaacgattcactcgcttcgataattttaaatgaagctacttgtccactagcattgatatattctccatgagaaacatgtccgtatattaaattcatagcatttaagtcattgatatggtcatggaggcttaagtctgtcataaacagactttcatctgttaagctatataagtcattctggctttcaatggtataaagttcttggcgttccttataggccttgttttcatcaaatccgatcaagatgagggtaaagcaaagaatcaattctaagctaaaaaggaaataaaataacaaatgttttttaacatttaattggatatgaaacaaatcgtacatatcgtcaccctcttaagccaataactatattagcttgacattgtttgtgtgcatagattactgccaagacaaaagctagtatggtagcaaaggcaagctcaattacataaacttctaagcttaagctaaagtagaaaaattctggtaccaagggaagcaggatataatataaaatgaccgcaacatgataagaaagcaatactatcaatgtgaattccacaattgtgctagctatatattgcccatcggactcgccacagacctgtctaacgattcggttcttttgatctagatgaatcaaggaagtcaagacgagactaatattaatgatagctatgagaaaaaagactaaaaaaaatccaagcagaaaaagcaaaaactggtttaaactcttaatctctctagcgatcatttggtccattgagtccctagctaatatactgtcactagaagcaatcctatcaagattttcattagccttgatagtgattagaatacgatctaccgaatgatttttttgactattatacaagtctattgggacgaggagctttttttctaaaaaggggtcttggctaatcgctttaactgtatagctagagttattcagttgaaaacgatcaccaatgtctaactttaactttcgagcaagttcgcgcgaaacaattgcagatgggcttccatcaaagcattccttccattgcttttcactgactgaatctaggcggtagtattgattatagttaacatcactagccagaaggtcgctttttatcttttgattgttggataaaatatagtcgcttgtattgattgtagtggtaaaattgtcgttttttccttttaaacttccaatacgatcaagctgaacgatctggtcaaacaagttgtagtggctttcatagtaagcaattttacgatttgtttccccaagtttgctgagaaacatcatgacaaaatacaaggaaatggctattgaaagaacggttaaaagtataactcggtaattgtggcttttttctctaattctaacgactaggccatagaggataggggtcatttttccaataccttaaataacttttgttcattgggcatcaggatgaagtatttacctgatccaccctttaacatagcttcaaaatcactttcattaaagctagctatggaatcaagatattcaaaattactattgtatcggtctatactggaccaaccacttgtataaacatagtagagatcatcctttaacagaaaatcccctgggaaactaccctcaagcaagtcaccttgcttgagcaatttctccccttctagtttataaatatggttttccccacctttaaaaccaagttggtctgattcttgaaaagccaccattgagtttgtaaataaaagacttgctgaatcttgatacataaaaccgataaatttatctttaatggaatgaacttgtccagtattgacctgaactttgaatattttggaatcttcaaaatttggtgtatttaaggttaagtaaatattaccttcccagacggtcatatctaaataataggaatctgattctttgctaggtaagtttataatattgaccaattcagctgaatcagtaaattggaaaacttgggaagtgttatcatctaaaacgtataaaaagtcattgcttttgcaaagtaaactcgggaattccatcctatcattttggatagttttaatagcttttaaatcttgatcgtaaaccgatacagtagccttgcttcgattgcttaaatacaattcttggttttcatcatcaaagtcaattccggacagctgatcaattcctaaagccttaaaatcgacctcctctacttggtagtcgttattttcaattttttctgtttgataaaattcttcattaatgctttcttcatccatttcctgacgacatgaacttagaaatagtaagataaatattagcggaaaatactttataataacttgcttcattgttctcacctacccacaggtctatttagataaagggggacttgggtaacatctattggattctgaaaacttaacagccgcaatcaatatgaacccgatcagtcttgtattgccaataagtagtattgtcctttttgacacattttcttttagaatattgatattgaactaaggctttactgtcccaaatgccgcatttttcgctacgacatttaggagtacttgttttatagatgtaatagctgccacatcctgctgcaacactcgtagcgtaaaccgtcataaatgtgcatgctgctaacattgtaacgatatgttttttcataattttccctccaaatgattcgatcaatttgatttcgtttgcaatataaaatttatatgtttcgtaattttgtcttctttttcgtaatcagtaatattgacactatcattattgcttattccagtgtatgatagcaatataaaaagggtttacttcttgtaaaagttctttgacaggggccataaatgggttcttaagcatttttgcgattgattttaggatgagtataaggcccactgccagttaatcagcaaaaaatgaaaacggaaccatccatctgtctttgaccaagaaagctagagtctaaaaatataattttaacttcatcgttccacttcccaatccttactctttagagtgtggtaatggtataaaggggtgtcatttggttacttatcagtgagggggatagtccatgattgggaaaaaaataaaagatattcgactgcaaaacaagtgttcacaaaaagaatttgccgaaaaaataaatgttactcggcaaaccgtttgtaattgggaaggggataagacggtccccgacatctataatatcttaactatatgtaaaacctttaattgtgatctttcatgttttgtagatgacaagccaaaagtgggtaaagaggaaattcaaaaggaagtcagtatccaaccgcattacatttacctgattgcactaacaggaatcttatcttggattattccttcattagtcgtggttaattttattgaactgattattttttattttttcataaaagtgaccaaagtcgagcggtacttgactttggggatttgcctgttttatacggcaacattttttatttattatgatttttattaccaagttttactttccttgcttccagtataagctagccgttataccttggtctcatttgatccctgtcgtctttctaagctttgcaacttcccaaaatgctttaataaaaaatcagtttgtttactagcagactggttttttagcttgctcagaagtctattttaaagaacgaatattatggttgaaatatgataagggcttgatataataaaaattaataagagtccggacttttattgaagcttaatttgaccactatgtatcgtttaaaaataatcagttgtagttgctggatgccaaatccgattgaccttggaattgataggctaaggagactcagccaatgaaatttttctaaaattggaagcgtatacaaattcgcacgctccatgactgaataaaaaatttttatcctatcatgctggaggcggaattagaccctagccaatcttgcagtcccaagcaaaaggcaatcatttagcgaggtggaaatatgacacagtatgatctagtcatcattggtgctggtccaggtggttatgtggctgctgagcaggcagcccaggctggtcagaaggtgactgtcatcgaaaaggaagcgatcggtggggcttgtttaaatgtgggttgcattccctcaaagacttatttgcaatatgcccactgggtgaacactatttatcaagcaaatgaaagcggtgtcaattctcaattagaaaatatcgactttaaccgcttatatgagcggaagaatcaagtggtccaaagcctgcaaaatgggattcattctatttttaaggccaatgacattgactatatccaaggagaggccaaggtcaaggaggacaaaatttatgtggaagatagggaagttttctatcaaaagcttatactggctacgggatccagaccttttattccaagtcttaagggcttggacggggttgattatttaacgaccgatcgtttctttgatttaaaagaaatcccagaccatttagtcattataggaggtggtgtgataggggttgagatggcctttgccatgcgacccctaggagccgaggttagcttgttggaagtagcggatgatatattgctgagtgaagatgaggaagctagagcaatcattaaagccaagatggaagcgatgggaattgacctggaagtaaaggcagatattcaggaagtccaaaaagactcagttcaaacagggtcaaagacttatgaatttgaccaagtcctcctggctactggtcgccaggccaatttagacctggctcaagaccttggtttagccctgacaggagacggtcaatttgttcaagtggatagctattatcgaaccagcaaggctcacatctatgccataggggacttggtagacagtgcccagctcgcccatgtcgccagtcaggaaggaaagtgtgcggtcaaccatctaacccgccagccaagacaagcttttaaccagaaactgatcccaagttgtgtttacactgatccggaaattgctagctttggtttaagtgaagcagaggcccaggcggcaggttacaagacccgtctttaccggcaagcttttgcctctaatggccgggccctagcctctggtcagacagaaggctttgtgaaattagtagtcgatgaaagatttggtgagctcctaggaggggtggtggtaggtgcaggagcaagtgaaatgatccaccaactcttgaccctggtggccagtgaagctaccgttcatgagttggccaatgtcattgtcgcccacccgacactttcagaagttatcggagagatgagtcagaagatagtgatggaccgaactcattaagctagggaggaaatgaaaatggaaaaaatgagcaagcaagcagccagacagacccaagcccatgccataactgaaagtgatgtcaagctcgatgaagaagctgtcagttttacccaggaccaggcaagatggctctttaaaaagatgaatgatattcgccactttgaagatgaggtccaccgccgctttctccaaggggaaattatcggctttgtccacttgtatgcaggggaagaagccattgccgctggtgttggtagcctgcttaacgatggcgacttcattgcgtccaaccaccggggccacggccactgtattgccaagggttgcgatatcaagcagatgatggcagaaatttatggtaaaaaagacggcctctgtaatggcaaaggtggctccatgcacatcgccgatattgacaaggggatgctaggggccaacggaatggttggtggtggtttcggtctcggactgggagctgccatgcggaataagtatttgaaaaacgataatgtaacggttgtcttctttggggatggagcctcaaacatcggcaacttccatgaagtcatgaacatggccaaaatctggaatgcccctgtggtctttgtgtgcgaaaacaactattttgcccagtctaccccatcctggtatgcttctgcttccgacaccatagcagaccgggccattgcctataatatgcctagtgcccgggttgatgggaaagatgtggtcgaagtttatacggctgccaaagaagccatcgaacatgcccgcaatggtgagggaccgtccttccttgagtgcgtcacctatcgcaattatggccactatgtaggggatgagcaaaagtacaaaaaacaagatggcaaagagaaggaattggccgacaccgacccaatcgaaaaatttagagactatatcttgcaagaagaccttttaagtgaagaagagttagacagtctagcggaagaatcgcaaaaggatattgaagcagcggttcaattcgctgaagacagtccagaaccagacccagaagccttgtatgaagacgtattagcttaagcacagtttgggaggggtagtaaaaatgactgaaatgacatttatgcaagcagtcaacaatgcactagacttggccatggaaaaagatgatacggttctgctgttgggtgaagatatttacggcgggtcaggcgttgaacacttagaagaaaaaaatgaagatgcctggggtggatctttcggtgtcctcaagggcttgggacccaagtatggggctgaccgggtgatcgacacacccatttctgaacacggttacatgtcggctgccgtcgggatggcggcgactgggcttagaccggtgcccgaattaatgtttaatgactttatcggctggtgccttgatgccatactcggccaagccaccaagttacgctatatgtttggggggaaagcgaaggttcctataaccgtccggactgctcatggggcaggggtttcggcttcagcccagcactccgggtcttactacggcatcttgggcaatattccaggcttgaatatcgtcgttccagccacaccccatgatgcgaaaggcctcctcttggcctgcattgaagatgacaatccctgctttttctttgaagataagaccttatatgggtctaagggagaagtgccggatgactactacaccattgagattggcaaggccaaagtcgttgaagaaggggaggacctcacccttgtaacgattggtaaaatgctttttgtcgcccaagaagccgctaaggaattgaaagaagaggggatttccactgagatcattgacttacgcactgttgccccatgggaccaggaaacagtccttgcctcagcccgaaaaacaggccgggtgattgtgatagatgaggacaacccccataacaatacagcaaccgatattgcctccgttattatgcgggaagcctttgactacctagacggtcctgttttgacggtttgtgcccccaacacccccgttccatttgcccgcaacttggaagccctctacattccggatgccgacaaggtgatcacagagggtgccgagttaattgacgacttgagacaacattaaagggggaaaagctatggctacagaaattagaatgcccaccctaggcctaaccatgaaagaaggcatgattgatgaatggttggtcgaggaaggggatgaagttagtgaaggcgatgtcgttgctgtgatcagctcagaaaaactaacagcagatgtggaggcccctgaagaaggcacaatcattaaaattacggctgatgtcggggatgaagtcccggtcaaagaagccatcgcttatgtcggtgagccgggtgaagaggttgaggaagaggctgacccggaaagggaggaggctggcgaagctggttcaggtgacgaggctggtgacccagaccaagaagaggacagtaacaaacaggctgaccaggaagctggcgaaaaatccccaagaaaagaagttagtgagtctcaaagttcacctggctctggtcaagatcggatttttatcactccggttgcccgtaaattagccgaagaagaaggttacgatatcgctcaaattaatgggactggtgctaacggacggattaccagaagagacgttgaggcttaccaaccagccagggaaggagttagcacaccagccgctcaagcagaatatggtcaaggtttagaaggcatgcggaagaccatcgcttcccggatgatgacttccttaaataccacagctcaagtgagtctccataccaaggctgatgtgaccgagttaatggcaatgcggcaagatgtcaaggacaaaattggtcgctccttggacaaaggcgaaatcagcctgcttagcctggttgccaaagccactattttggccttaaaagaccacccagaaatgaacggtttgtactatgatggggaatatacccagtatgacgaaatccacttaggcattgctgtcgatgctgaagaaggcttgtctgtgccggtgatcaaggatgcccagaccctgtccttaagtgccattggggaaagaacccgctacctgtctgaaggggtccgaaagggcaacttgcctggcgacttatacggtgggtctaccttctccatctccaacattggcagtgagggaatcgacttctttaccccaattatcaatacacctgaaattggtatcctaggggtcgggacagtcaggaatgaattgcaatttaacgaagataaagatattgtcgaacacagccagctaggcctaagcttgacctttgaccaccaaatcgttgacggtgcacccgcagcccggttcttagctagcattgtttcctacctggaaaacccttatgaattactgctttagccggtaaactatgtgagtaaagcaaggttaagactatgatttagccattagaaagttaaaaatcgataactaggtctgccgcaaacaaatcaatatactaacaagaagcaaaaagccccaatccaagtagctttcatggcgcttggactggggctttgttattttatctagtgataagtgggggaatttctttggtctctttatcaatagtgtgggtgggaaaaagaacggtgatccgctcatacactttgctttggggaagccactagctatttccttggactcacttgtcttgcttctactaactgaccactaaggtgtggtcaatcagcttggccacttggtcccggagattgtgggtaatcatgatcacactggtttcctcatcacttaagagaagtttttcgatactgacagcggtttcctggtccagactggaggtcacttcatctaagagcaggatttttttatcccgaaggagggaccgggcaatagacaggcgctgcttttgcccgccggacagcattttcccgccttcaccaatgtagtagtccaggccgtctgattgaccagccaccaagtcagccagttggacttgttctaaggcccggtagagttcttcatcggaataggtctggcccatttccaagttttcccggatcgtcccatcaaagatgtgggggttttggtcgatgtagaggacctggtcaaagagttcctggtaagtcacctgactaagctccttgccagccaggcggatcgagccttgatagtggtcaagccggccgccgattaggttcaagagagtggacttgccactgccactttccccaacaatggcatagttcttggccaggtgaaagtccattgtgaagttatcaattacctgcttgtccgcgtaggcaaagtgaacattttccaagctatagcccccagtgaggggctgggtggtcagtgtttgctccttgcttttgggactggcctggaccctttggaatttttcgaaaataggctggctggactggatccgggagatcatctggctcaggttacctgagctgttaaaaatgtttcccgccaggctggtggtgaccataatggaccccactgtcacctggccggtcaaagctaggtaaccggtcagagcgataatccctacctggcccaagacattgcccaagccacctgccaccgccacccaagccatgactttggtgtagtggaaggacttatcggacaagtccttggcctggttagctagttggtctttcataaaggggagctggcggtaagaaaagagagtatcataggcagctaaaaagtcagtcaccttacttaagtaactttcatggccctggctgagcttgattgtttcctggacaatggttgatttaaagagtcttggaaggagtaaaatcaaggcaagggacaagagagtataggcgattaaaagccagtggagggtgagcagggtgaggaggctcaggactagggagataacgccagccaagaggtcgtaaaatgggctgatggagtcagtggcaacctgcctgacatcattcatcagccaggaggaatagcttgctggtttcttttggtggaaggtctggtagtctgttttgacgagccggtcgaccagtccctctcttaaggagaccttcattttttcttccgtttgcccctggtagacgatcctgaagtaggtgaaggccaagtaaataaaaaagataaggagggttaaaagaatggactggacaaacttagtcaagtcaggttgaacaatggaattgacagctctggacagggtgaaactactggcaatttcagccaagctgacactagccaggagcaggataatgactatatttcgaaatttgaattcctttactagttctttcattactattcctccacttttttattgtataatttgactaccatcacaaggtcaagctagtaggctagtttggcctaagagaaagaaggggtcagcatgaccattggtgatttattaaaagaataccggctcaatatgggcctgaccttgagtgagatggctgctggcgtcttgtcaacctcttactatgccaaggtcgaaaaagaccaacaccggattacggccacagacctctttgacctgctggccagccatgccattcccttagatgactttttaaaccactacctgcaaacaccccactccttcaaaaaagacatggaagcgatcatcacccttcactaccagggggaccaggctgggatcaaaaaaattatggcagcctaccgcaagcttgatacagaaaaggcccagaccataattgccctaggggaaagttgcctctatgacttagaccaaggccgggctatttctgagaccagcagagacctgattaaggaaaaactcttttcccttccaaactggaacctctataagttatctatttatgctaactttgtctccttgtatgacatcccgagtaaccaggtctttgtctcggccaacttgtccaagaacttggaccaatacaataagggagagcgggaggtcatcggtgtcatcttgctgaactttatcgaagtcttgctagaccaaggcgagctggctctggccagctactacctagaccagacccaaaaagtcctggtcacccgtcccgaacagctctattaccatgttgtcatgcacttttacaagtccctggtccgctatttgcagggtcatggcccagaccatttagcccagtgccaggcccagttaaacttcctcaagaccaatggctacacccaagaggcggacagtttagcagcctttcttgaaaaaaattctcttgaaaaaaattccggctaagcttttgtggcagggggctagtcttattccggaccatgaccttggaccaatggaaattttccctgtggcagaaagcaagtcttattccggaccatgaccttggaccaatggaaattttccctgtggcagaaagctaatcctattccggaccataactttcaactaatggaaaatttcttctcggtggcaagggctggtttctactttggaccacgtcaaacttaatctttaataatgacaacatcaatatcaattttaatgcctgttaatccgacttccataagggtgacctcccttcatttggactagccttagtatagtctggggcggatttggcccggggtgatttgtcgtaagtgacaaaatagtttatatgtgacagcaaaaaagccaagctagtttgacctagtttggcttttctgattgttttgactgaagttaagtaaggcaggatttttgctgacctgatttaggcctggtttttaaaataatccagggaccggatccggagatagagggctgtagctaggaaggccttgagcaagtcgatggggaagaaggtcaggatattggtcacaatgaccgctccaaagggaatttccaccatcatgacccggttcatgataaagtactggtgggtaactccgaacaagtagaggataaagatggcgaccaccatgtggaggaggacccctttaaaattgagggggtctctgagtttcttccccaggtagatggcctggatgaagccaccgattaaaaaaccaaaagacgggctaaagatagactggaagccacctgtcccccctgccaagacggggaggcccagtaagcccagtgcgatatagagcaagatggctagacttccctttaagggtcccagcaaggctggaatgaggaggaagaaaaaaacttggagggtgaccgggaccggccaaagagggatcaccaggatggaagatactgctaagagggctgtgaacaaggcaatataggtcaggtcacgaacagacatgaagtcaactccttctattacaatcatctcttaaattatacactagctccagggtctttgtcagttaatcaggcgaaaaaatggcaagttatctatttatctcatattaagcccgtatcaattgcaattaagtgagaaatgtttaataatagaaggtaacttagactttagaaggtgatggaatgcagcaagcaatcaaagattatatcctagaccatgaagcagacatggttgagatgagacgttacctacaccaacaccccgaattatcatttgaggaagtggagacgacccaattcttcgtcgacaagttagaagaattaggcctcccttaccgaaccttagacccgactggtgtggtaacggaaattgaaggcgaccatccaggcaagaccgtcctcttgcggggggatatggatgccttggcaatcaacgaagccaatgaagtagactacaagtctcaaaatgaagggaagatgcatgcttgtggccacgatgggcatgtctccatgctctttttagccttgagagccttgaatgctaaccgggacttgattcacgggaccgtccgttttatcttccaaccagccgaagagatcggacaaggggctaagacagtggttggtcagggtgttacagagggagtcgacaatgtctttggcctccacattttatcagctgacgaaacccacaaggtatcagttgagccgggcccaatcctcgcagctggggacaagtttaccgtcaagtttaagggtgacggaggccacggtgcccaaccccatgccagtaaggatgccttgctcatgggagcccagttcgctaccaatgttcaagctgtggtatcccggacggtaaaccccctccaacctgcagtagtttcccttggccaatttgaatccggcagccggtttaacattatcccaggcgaatcgaccttggttggtactgtccgggtctttgacaacccaacccgggaaaagatagaagaaggaattcgcaagtatgcccaagccattgcccaggcctgggacgggcaagcagacgttgaatatgaacgcctagtcgaatttgtcgacaatgaccgggcttctgccgaactggcccaaaaagtggtcaccgaatccttcggggaagaaaacctccgccacaacccggcaaccatgggcagtgaagacttcggctacttctctcaacaagttcccggtacctttgcgacagtaggttgccggaaccccgaaaaaggcgctaactaccctcaccaccacccgaactttaacattgatgaggatgccttaaaaacaggtgctgaactctatgcccagtatgccttggcctacctggaccaggatgaattttaacctttaatagaataataaaaagcaagcaggttagcttgagctagctgcttgcttttttgtgtgtttgctggaggacggttgatggttttgtctttgaagcggtgcctttttattcgagcctaggcctagacaaattgacttggcactaaacaaggctagtccagcctagcccatcctagccaagtctttagataaactgagctaggtccaagactccatccagctcggcttcaatttcagacctcagattgtgggtgatcatgatgacggttaattgggggttggtgacaagatttctttcaatattgagggcagcttcttggtccagactggaggttccctcgtcgaccaagacaatatttttatgccggataaagccccttgccaaggccagacgttgcttttgcccaccggatagggaccggccgccttcgcctactggggtatctaggcccttcgccaagcctttgacgtagtctgttaggccggcttctgccagggcttgccagacttggtcttcactaaaggtctcacccaggctaatattatccaaaatggtcccttcaaaaatataaggggtttggtctaggtacataacttcctcccggatatcttctcccttggtttccttgatctcattgccacaaattctcaaggatccttggtagtcggttagtttgccgtttaaaatattaaagagggtacttttcccactcccacttgggccaaggatggcgtatttcccattctggctgaagtcataagaaacaccctggtcccagagctggtctccttggtcataagtatagttcaattggttgagggagatggtgttgttggccacttcaaaagattgggattgaggccggtcagtgtttttgagggattggaatttttcaaagatgggagtaatacttttgatctccaaaatagtgttggtaatattgcccacactgttaaagatcttattactcaaggcctcggtggcgttaatggacccgatcgttacaatttgttggagggccaggtaacccgttaaaatcaagataccactctggcctaagaggttgccggaagccccaagaatggcactataggtcaattgtttccgctggtcaacttttttatcggccaagtcctgggaggcttggtagacccggtccctaatacgagagaccaagttataggaaaagagggtgtcaaaaccttgcaagacgctggtcactgttccaacaaatttttcctgttcctgggtcatctcaagggtactgtcttggacccgttttttgaccagcatgggcaggaagtaagttaaaagggaaatggcgaaggcaaaaagaacgatactccagtggaagaagattaaagaaacagttgcaaagagggcttcgataatcatggtgatacaggcgtagaggttggtatagccagttgcttcgatagtggtaatgtcgttattaagccaggagataaaggctgaggcttcgtgttggtggaattcctggtaggtgaggtcttccaaactttctgtaatatctgtccggatctgggtgaccatgagttggatgaccttggcttcgtagggaatccggaagaggagagacaagacatacaagcctagcatgaggataatagctagcatggaccagaagaactgggtccaattaaaggcgatcaaggagttgagggcacgggcatttaagataccagccaaaatctgggctccagccccaacagtaatgataaataaaagaaggaggttttccttccaataagcttttatgtaagttgacatgggtccaccactttcttgttagtttgacgaatttaagcgtaagcgacctcattctcagcgatcacgttttaaattaaaatcgtttttttatttttgtattattattatattatatttatttagaatattcaaatattttttaacttacttgcttgtttttggaagttggtccctcatattttaacttaagcaatggaatacaggtagttaaagtagccatttgcttcaactaaatcagcaaaactgcctgattcggctatattgccattctttaagaccagaatttcatcatactgttctaataggcctttagccaaagagtgggtgatcataattttggttttttcacttaggtttaaaatgtcatttgtaatttgataagccgtttccttgtctaaggcagaagtggcttcgtctgttaaaaaaattgaggaatttttcaataaggctcttccgatggcaatgcgttgcttttcaccgccggataggttaaccccattttccccacaggaataggagagtcctttatcattaactagcttgcggagggaagcttggtcaatcacttcttgaatttggtcctcgtcaaagtcttggaacattgtcaagttatctagaatgctggcattaaaaataaaaacatcctggtctatcaggctgacttcttcatataaagcatctagtttggcatccttcaagttaatttggtcataataaatatctccagatactggttgctggtttttcatcagtaattttaataaggttgatttacctgaaccagaagcccctacgatggcgtaggacttgccccttttaaactcccagtcaagatctttcaggattgtatcccctccaggataggcaaagggaactgattgtagtttaatcgattcttccaggctggttagtggagtcatctcttgatctgggtcagcctcccctggatcgaggaaagaggcagccttcttgattagtcccaaggcagcccttctttctgagatcatagtcggcaggttgaccactgggctaatgataaagttcattaaattcacaaaggaaatgatcatcccagctgtaaagccttggtcattcaggactaaataagctccaaacatggtgacagccaactgggtaaaaatgccagacccctgactaaataaggtaatagttaatcgactgttctctaattgttttttgttttcttctaaattttcattgctttgacccaagtgttttgcaatttgtttttcggccttaaagtttttaaccaagggaaagccattgataaagtctgaaataatgcccacaaaagtcgaatttttctcggaaataacttgctcaatcttaactaggcgcgagcccgtaattaatgaagatattacaggaatcatggtgatagcaatggagactagggtcattaatacagataagtacagcataaaagctaaagccccaatgaaggttacgatttcagtgatgagggtaagttgttgccggacgtatttctcttcaatgaccttggtatcattggttagggcggataaataaaccgatttccccagttggctaaagtcggctatgtttttacgtaaaagcttttggagcaaatactgcttataattgaccatcgctcttttaatataacgggggaaaaaataggcatttagggccatgataataattgttaagaggataaaggcaagtgccaagtaaaggacttgcataaaagtcatagacgcttctcccgtagcaatatcaatagccatttgaagtaaccaagagagggcaacattgatcgctgctgtcccaaaagccacggcaagagcaccaagaagatagaacttattatctcggtacaactcttttactaattccttataaagcttttctttcatatgaatcccccttgtggtatatatcagctttaattatttatcattttacttatgataaaataaattatatcatttaaataaaataatttataattttaaacttattatatatttaaaaggatctgaaagcaatagaggtaaaagaagtaaacgaaatgataaaattgtaagattatctgatgttttcactattcaaaacaaaagccttgcaatgccaagtaactttctatatactatacctgctgaaatgagattgaggaattagttaaataagatcgacgtagtgaaagtacgtcctatcaaaacttgaccagctggatttggtcgctattggtgggaagtgctttttttattgacctagacgacgagcactcttgtgcattgaggaggtaaagtgatgtctttagattttgacaccattgcggctatttcaaccccaccaggtgaaggggggattgggattgtccggatttccggtgaagaagccattgccatagcagaccgggtttaccagatggggagcaaaaaaatttcggaccaggacagccacaccatccactacggccgggtggtagaccctaaaacggaccaggtggtggatgaagtcatggtgaccctgatgaaggctcccaaaacctataccaaggaagatgtggtggaaatcaacagccacggggggattttagccgtgaacaaggtcctccagctggtgttaaacaatggggcccgcttagcggaaccgggcgaatttaccaagcgggcctttctcaacggccgggttgacctctcccaagctgaagcagtcatggatatgatccgggccaagaccgacaaggccatgcaggtggcggtcaaccagatggacggggacttgtccaagttgatccgcaacttgcgccaggaaatcctggataccttggcccaagtggaagtcaacattgactacccggaatacgatgacgtggaagagatgacctctcaaatgcttttggaaaaagcccagtctgtcaaaagccaggtcaaggcactcctagaaaccgcccagcaaggcaaggttcttagagaaggcctggccactgctattatcggccggcccaatgtgggcaagtccagcctgctcaacaaactcttgcgggaagaaaaggctattgtaacggatgtggccgggactacccgggacattgtcgaagagtatgtcagtgtcaagggggtccccctccgcttgatcgacacagctggcattcgggacacggaagaccaggtggagcgaatcggggtcgagcggtcccgcaaggccatccaggatgctgacttggtcttgttggtctttaaccaacatgaagccttgaccgatgaagacctggccttgattgaagctaccaaagaccacaagcggattgtcatcttgaacaagtctgaccttgaccaacacttggacttagaccggctcagccaggccctgccggatgctgactttatcacaacttctgccatgaccgacttaggcttgactgacttagaggacaagatcgctgacctctttttctctggccaaacaggggaccgggatgctacttatgtctccaacacccgccacatttccctcctcaacaaggcagctgatgccttggatgaagtgattgaaggcatcgacttaggcatgccggttgacctggtccaggtcgacatgacccgggcctgggactatctaggggaaatcaccggcgacagcgtccaagatgaattgattacccaactattcagccagttctgcctgggtaaataggctggactggcttgcttggcagaaacaaatgaatgagctagaccggtttgagggataaaaactgaaccggcttgctgtgcagaagaaatatgattccgctagttctgttggggaaaactctccctgaccctttagctgaaggctaaaatcaccacactgcttgcaggtgtatacctctttggccctgaccctttagctgaaggctaaaatgatcagctgattttgcttcagttaaaagtaagctgaccgccagttcggtctcatcccaagctattttttgcccaagcaagccagcctaagattttcaaacgaaagacaagactgaccctggaaatagaaaggaagtcattgatggaaagataccaagctggaacgtacgatgtcattgtagtgggagcaggtcatgccgggtcagaagcagccttggcagctgcccgtttaggggctaagaccttgctggtaaccatcagcctggacatggtggcccacatgccctgcaacccatctttaggtggtcctgccaaggggattgtcgtccgcgaaattgacgctttaggtggggaaatggggcggaatatcgacaaggcctatattcaaatgcggatgctcaacaccgcaaaaggcccagctgtccgagccctaagagcccaagctgacaagcatatttactccaatgaaatgaaaaaaaccctagaacgccaagaaaacctggacctcaaacaaagtgtggtcaacgaactcattgtcgaagacggcgtggtcaaaggagtcgtcacccactcaggtgcttcctacactgcccaagctgtggtcttaacagccgggacctcttcaagagggcaaattgtggtaggcgacttgaaatactcctccggccccaacaacaccctagcctccattaaactctctgaaaacctcttggacctaggctttgaactggaccggtttaaaacaggaaccccaccgcggatcaacaagcggaccatccactacggtgagaccgaaatccaggaaggccacaagacccccaaccatttttcttatgaaagcaaggatgaagactacctagaagaccaagagccttgctttttaacctacaccaactcggactcccacgatattatccgggacaacttggaacgagcccctatgttcaccgggattgtcgacggggtaggggcccgttactgcccttccattgaagacaaggtggtccggttctcagacaagccccgccaccaaattttcctggaaccagaaggcctggacaccgacgaaatttatgtccaaggcttgtcttcctccctgccagaagacgtgcaactggaagttctgaagaccatccctggcctggaagacgtggagatgatgcggaccggctatgccattgaatacgatgtcatcaccccccaccaactccgcccttccttggaaaccaagctcgttgacggtctgtttacggccggccaaatgaacgggaccagtggctatgaggaagcaggaggccaagggattgtagccggcatcaacgctgtccgcaagattagaggccaagagccctttgtcatgaaacgggacgaaagctatatcggggtcatgatcgacgacctggtcaccaagggaaccaacgaaccctaccgtctcttaacctcccgggcggaataccggctcctcctccgccacgacaatgccgacttccgtttgaccgagaagggttatgaacttggcttgatttcccaagaccgctatgaccgcttcttggagaaaaaagctatcgtggaaaaagaactagaccggctcaagtcagcccgactgaccccaagcgatgtccacgactacttggaagcaaaaggcgaaccccagctcaaggacggcaagcaagcctatgactttttgaaacgcccttatgtgacctatgaggacctgatggaatttgtccctgctccagaaaaactgggacgttacgaggcagaacaggttgaaatttccatcaagtacgaaggctacatcgaaaaagccaaacgcaaggcggataagatcaagcggatggagaacaagcggattccagaccagatcgactacacccaaatcaacggtttggcgaccgaagccattgaaaaactggaccttatccggccggaaaccattgcccaggctagtcggatcagcggggtcaatccagcagacatctctatcctcatggtttacgtcgaacaaggccaagtccacaaggcgaaccaggcttagcttgggccttggattgggagcttagacttgcttcttagttgccagttgattagcttttgcctagactgtgccaacttgaccgaggcaagtgggaaggggaagagcttgagcctgcctgccgattttaaagaccagacaaaagacaagctagccccttctctttttcatttggcttggaaacaagggtttttcaaaagcaagggcattgcctgggtcggttttttatcctagaatagacctatgagacttgatcattcaaaggagcgcaaccatgtttaaggaatttaaagagtttatcatgcaggggaatgttttagaccttgccattggggttgtcatgggggcagcttttaccgccatcgtcaactccctcgttgaagatctgattggaccgattattgcagctctctcaggtaactcggacatcagtggcatgaccatttccattgggtcagccgagttgggagtgggagcctttttacaatccatcatcaattttttcctaatctccatcgtcctctttatcatcatcaagggggtcaacaccatcacccggcagttcaagcacgaagaggaaaaagaagaggagtctgccccaactgctgaagaactcctggctgatatcaagaccatcttgaaagaagaaaaacaagcccaagccaatccccctgaagaggaaagcccagaccaagcccaattgggtcaattagaagaataagaccagacaaaaaggccagctgacgattcagctggccttttttgtatctggatcgcttttattgtgtggtcacttttatgctaggacattggcgcaggggctgggagcgaaatggacctgcccctcaagtcttttatcataaatggtcctggccggctaactcctttatttttggggaattgtcgcgttgtgggcagctaactcctttattgctgagcaattgtcgcgttatgacttcataactcctttattgctcagcaattgtcgcgttatggctagcaaactcctttaccgcagccgaattgtcgccttacgaccgtttcccgacaaacatctgccattgacgcctcccagctaggccagacttccctaaaaagtaaaaattttacagtccaaccgcccaggctagaaggcgaatcatttgccacccccactgactctttaaaccctagaccaaaaggccgataaagccactggaggcatagaggaccatgaattggacaccgtagttgacgccccagcggttgaagattccggaaatgctggcgatcaataagacaccgaagacgtttaaccagccagcatccatgtaggccaggaccaccacaagggcaaggaagaggcctaatatggcttcatgggggatttttgaaaagataaagagggtaatttccttggcatagcggacggtaataaagtaggtgatggcaatcgccaccccagcccccaggacaaccggcaggacaaattcgcctgtcgtcaactgatggtagaggttgttgtccaaggtgtagacagggggagcgttaaagagggcattgcccggaccaatcgccaccccgcttaaaggaatcccaatagccagcagggggatcaggatgccggcgatataagaggcattgtttaaggcgttcatgaccgtgactgtcatcttggaccggtccagctggtctttttcgcgttgagccaggctttcgccgatgaaaaccatcattcccacgggggacatgaagaaggtgataacccctaagacggtggccaaaacactggaggacaattcccttctagacaagatctgaaaggggttgaggctggacttggtctctgtttggctgatggtcgtctttagatacgtctctcgcttgaatttctcagcaaccgacccgccacttaagagttccaaaaggttgaccatcaaggggccaatggtaatggccaggaagaaagaaataaagacttcctccccctctggcaaaatttccaggccccaatagagctggttgagcccttggaagaggatggacaggggcaggatggctaggaggggcatgaccttgtttttggacatgagggccaaaaagagggttccgatcataaagatcaaagtggcattgtctgaaatagcttggccaaaggggactaaaaaggaggccagcaaaaaactgagggggatggccaaaacagttcccaccaaggacccagctgacattttccggatgctggtgtcggttagaccttcctgtttcaagttcatggctgctggaatcataggggcagacatgacacctgaggggatgccgaccacgccgactggaatattgccggtaatcatcttggagacaatggccgcgataaaaaagcagaggaggacttggggcgggattccggtcaaggccaagaccagggtgaccggggccaggacagctgtttcgtcggtgccagggatgaccccaagcagggtgtataggagagagccgaaaactgccacggctagcatttgacctacaagcacaagatccatagctagtcttcctccttgccaggttcgactcggtcaatctgccgcttgggcttgaagaggagggagttgatgacagttgccaggacgatgccaaagatcccggccaagagtttgagggagtcactagctggagtgaccagaaagaagcccagccccattaccgtcgccaaggctagggaaaagaggaggggcttgacggcaatgacatcgccccagacttcatagagttggtcttttttaccatcaggatttttcattagaaccttcctatctcaattaagtgtaatgattaacaatctcacgctccattatcatacaccagggctagacagaattgaatggctttaagaaaatcttattgattttgtggggaaagggctagcctagcgcttcagttaagtaagccttatcaattatttcatagccttcccaataccagctttttaataatagttttaggaaaagaatggaatttaccatggattgattcttataagtatgatatattagaaaacgtagtttgttttataattagaaatcatcagtcttggtggcattttactggactttttagggtattagtctgataaattctatttatatcagctagaagatcaaatcggactaattgaaccttatcgtcctagaaaaatttaatttagtcagtcaataaatccagtaatgtgaaaccagttacatgtttggaaaggggtcatataatcaaataatgagtaaggataacaattggataacctttttccgaacatttgtgacagggggattagggtaaaatctaatgaagttaacaaaacagcagtccttagaatcattcgcaatgaaacgactcaaaattaaaggagagatttaatggttggtaaaaataactttaaactaagacgggagaaaatggggaacaaattctaccgttattccatcaaacgcttgtccattggggtagcgtctgttgctgtttcagcaggctttttgtttgctggacgggaggctgtcaatgttaaggcggctgaagtttcagacgaaaatcaggccctaagtcaagaacttgacccagaccaaaacccagccttaagtgaaggttctggtgtagaagaccaggagacttgggaaattcctagtaaattcggtactgaacttcctgatctagacgaagaactcctcgaaggcattgacgacgaccaggaacttctacaagaagtagaaggccaatcaccggaggaagcgccagaagaagccaagggtcatgaagaagaaagccaagacatcgaaactgaggacgactcagaccatacacctagccaaaacgagctggaccaaaacgagctggaagaaaccctgaccgaggatccagacgaggatgaccctgaggaagaccaagctgaccaaaatgatcaagagggtcaagttgatgaagccggtcaatgggaagaagaccagactgaccaagatgataacagagaaggtcaaaatcgagaagacttaggtcaaccggatcaagaagctgttacaagacctgacctagacggcgacaaaacagatgaaagcaaaccagctgaccattcgggggatagtagtgaagaagggtcagttaaacctgaactctccttgagaaactacatagacccagagggtaaaagcctgactgaaatcatcacagatggcttcgtcaaagcgaccctggacgatcaagaattagatattgtccgacaagacggtcacctcttgctcaaccaacctctccaaacaaatggcagattacaactagaagccattaacgcggcaggggtaaccaaccgacgggattttgacctaaaagaagacggtacactcaaccccattaaacttgtggagaacaagctcgaaaatggccggttacaagattctactgctgacagttcaagccaatattctaaccgtgctgccaacccacaacctaccgcaggcacaactcgatcagctaacaccttaagtcgtgctgccaatgacaacctttctccccaaagtggccgggatgtgagtaatgaggtaatagttgaaggtaatttacaagtcccaactgattcatacactgttgctagatttttgggaataccaattaaaaagactggtaattatatccaaccaactagtggtgacagtatttatttcacactttcagttcaagttcctgaaactgttactagtggagactatattgacttgcattacgctccagaaattgccattggtcaggttgatgtaaatgctcgcacaggcttatcttttagagaacgtagattacacgaacaaatatatggcactcctagaccaacaattactgatggaaatggcgatatcattgcctatatagaagatgatcgtgaaaacaatatcatccgttatactttcacagattatgttgatagaaaatcgaatgtccgattttctcacacattaaatcactggattgatttaggagaagcacagaacactggggagtatcctttatattatagaattggtgacgaagttttcagagaggatacttttatagactatcgtcaaaacgtcagaagaaatggaccagcatctacatcgtctgtcataaactgggtcgatgataaaactaatacatttagagcaacagcctatttcaacattgacaacaattatattggaacagaaggcagagttttttatatcacagctacggaaggaacagaacccggagctccgaatgctatcaatatggattcattggacatacgggtttaccgcgtgtcagatggtagggtattaccagaaagtagagcttttgatccagttgcagttggagcagaggatattactgatcaagttaatgtcgaaagttatttaacaagtgataatgcgacagaagatggagactactggattgacgcgccaaccaataactctgacacctatattatggtagtccatggaacatttgatcccgatcgtctagggcctcaaggtgaatttggtatgcaagtacagtcaaatgatgttgattatgagacaggccagcaggctggacatacatcatacctagtatattctgtggaagccctatccggtgagggcaataatataatcgaaggtggaggcgaagataaagaagaagaaaaaggccctctttttgaaatgaccgttgaggatactggatatggtactaaatttgtagaatcagataggcccggttggacaggtattcgagaagttagacctggtcaaaatggacgcgtccgagttttatacgttcacgttaacccagaccaaattcctggctttaccccagatgattttgtcaatatccgcggccaatactaccaagaagtctcccgtgaagttatccaagagtcagaagaccaaattgtcgaatactccctaccaagaattgtcaattcaattagaagaccagacggtagcattgaatttatttataacgatggacacacctttactgttccgccagctcctacccctcagacccttgttccggttgtagagactgaccgaggccaaggtccatcaaatccaagtgacgataatattcgaagttatttgactgacaattacaatggtgacacacgtcttggtacatgggtaaccattaaaaaccctactggtaactatactattaccggcgaaccagaatttattgaaagttatcgttttattccagatggtgcaaatggtgaaagaggtaaagatggccgttcagttactatcgacttggtagatggtgaagtagaaggtcgagaaggcacatgggtttttgtctatcaacttgatcttgaaggcaaccaaggcgaattgattgatagtgaatttattccagatggccaagatggtcacaaagttgttattgagaatagaacaccccaaggctttgacgtagttatcctagatggagagggtcaagaacttgatcgtgaaactgtctcccacggtgccaaaggtgacccaggtgaagacggaataaatccagtcattctaaccgccagaggtcaaggaccagcagatccaagttatgctctggaagttattaacgaaccaggaaaatacaatggaccttatgtttcaggtttatggatcaccatttattctccaattggtagaactagcactggggaacctagatacagagaagacgttcgattcattccagatggtcaaaatggtgaaaatggtcgcgatggtcttacaccacgtgttcgtcttgaagatggatcagatgccttggataactcaggcaaatgggtgattgtggaatacccagtcatcgacccaacaactggtgaacttgtagtagatccagtaaacaacgaacctgtttatagtgaaattcaacgtgagtttattcaagatggcgaagacggccttactccacgtgttactgtggaaagcggctttgatagtgatggtaatgctggttcatggattatcgtagaaagtccactcaccaacccaatcactggggaagtcacttatgaagaaaccaaccgaaccttcgtaaaagacggtcaagacggtgacgatggtgaagatggagccgacggcaaggacggcaactatgttcaagtcgttgataacggtaatggcacttacactatcattacccttgacggggaaagtgatgaaccaattaatagtgtcatcgttcgtgatggtcaagacggcaaggacggcaactacgttcgagtcgttgataacggtaatggcacttacactatcattacccttgacggggaaagtgatgaaccaatcgatagcgtcattgttcgcgacggtaaagacggccaaaacggtctcagtccacgggttagtgtggaaagtggctttgacagtgacggcaatgcaggctcctggattatcgtagaaagtccactcaccaacccaattactggagaagtcacttatgaagaaactaaccgaaccttcgtgaaagacggtcaagacggtgacgatggtgaagatggagccgacggcaaggacggcaactatgttcaagtcgttgataacggtaatggcacttacactatcattacccttgacggggaaagtgatgaaccaattaatagtgtcatcgttcgtgatggtcaagacggcaaggacggcaactacgttcgagtcgttgataacggtaatggcacttacactatcattacccttgacggggaaagtgatgaaccaatcgatagcgtcattgttcgcgacggtaaagacggccaaaacggcctaagcccacgggttagtgtggaaagcggcattgacagtgacggcaatgcaggctcctggattatcgtagaaagtccactcaccaacccaattactggagaagtcacttatgaagaaactaaccgaaccttcgtgaaagacggtcaagacggtgacgatggtgaagacggccaaaacggcctcagtccacgggttagtgtggaaagcggcattgacagtgacggcaatgcaggctcctggattatcgtagaaagtccactcaccaacccaatcactggggaagtcacttatgaagaaaccaaccgaaccttcgtaaaagacggtcaagacggtgacgatggtgaagacggccaaaacggcctcagtccacgggttagtgtggaaagcggcattgacagtgacggcaatgcaggctcctggattatcgtagaaagtccattgaccaatccaatcactggggaagtcacttatgaagaaaccaaccgaaccttcgtgaaagacggtcaagacggtgacgatggtgaagacggccaaaacggcctaagcccacgggttagtgtggaaagcggcattgacagtgatggcaatgcaggctcctggattatcgtagaaagtccattgaccaatccaatcactggggaagtcacttatgaagaaaccaaccgaaccttcgtgaaagacggtcaagacggtgacgatggtgaagacggccaaaacggcctaagctcacgggttagtgtggaaagcggcattgacagtgacggcaatgcaggctcctggattatcgtagaaagtccattgaccaatccaatcactggggaagtcacttatgaagaaaccaaccgaaccttcgtaaaagacggtcaagacggtgacgatggtgaagatggagccgacggcaaagacggcaactatgttcaagtcgttgataacggtaatggcacttacactatcattacccttgacggggaaagtgatgaaccaattaatagtgtcattgttcgcgacggtaaagacggccaaaacggcctcagtccacgggttagtgtggaaagtggctttgacagtgacggcaatgcaggctcctggattatcgtggaaagtccattgaccaatccaatcactggggaagtcacttatgaagaaaccaaccgaaccttcgtaaaagacggtcaagacggtgacgatggtgaagatggagccgacggcaaggacggtaactacgttcgagtcgttgacaacggcaatggcacttacaccattattacccacgatggcgcaactgatactccaattagcagtgtaactgtccgtgacggtcaatccatcactgcaagcactcaacctggtgaactgggtggcagaaccggtgtatggattatcattaaagatcgcaacacaggtgctgagcttgatcgaacctttgttgcaaatggcgaagacggtcaatcaattaccgcaaatgttgaatcaggtgttgttaacgaacgtccaggcacatgggttattattcgagaccgtgaaactggtcaagaacttgatcgaaacttcatctatgatggtcaatctattattgcttcagtcgaaccaggtacactaggtgatcgaccaggtacatgggttatcattaaagatcgtcatactggtgatgagatagatcgaaacttcatttacaacggtcaaaatggcgaagacggtcaatctattacggcaaatgttgaaccaggcgtcttcaacggtcgtccaggcacatgggtcattattcgagaccgcgataccaaccaagaaatagaccgtaacttcatttttgacggccaaaatggtaaggacggtaattacgttcaagttgtagaaaatgacgatggcacttacaccattatcacccttgacggggaaaccgatgagccaatcaatagtgttgtcgttcatgatggcgacaaaggtgacccaggtcgcgatggtaactatgttgaattagttgccaatgatgatggaacttacactatcattaaccgagatggtgaaactcatgaggaactaagtcgtgcgactattcgagatggtgagaatggtaaagatggtaactatgttcaagtgattgacaatggcaacggtagctacaccattgtcacccgcaagggggaaacccatgagccaatcaatagcgtcaccgttcgcgacggcgaaaaaggcgagaaaggtgacccaggtcgttccatcaccgcacaagttgaacgtggtgaacaaaatggtcgaccaggcacatggattaacatttatgaagtgaatctagatggcagtcgtggctcattaattgatcgagaattcgtttttgacggaaaagatgggcaagcaccaaccatccgaactgagccaatcaaagatcgagagggaaatgatcttggcattcaagtgattgtcacaggacctaatggggaacacatctctaccgacactattttccacggacgagatggccaagatggtgactcagtcaaagttcgtgataaccaagatggcagctacaccattatcgctgttgatggtgaaggcaatgaagaagtcgttggaaccattcgaaatggtaaagacggcgaaaaaggtgagaaaggcgacaaaggtgacaagggtgaaccaggtcgcgatggtcaagacggttcaaatgctggtaacatcattatcgataacaccaacatcaacaccaatgaaaatggcgacattgtcattaccattgaaggccaagacccagtcgtcattccaaacccagataagcttgccaacccaatccaaaacatgcacattgatgaccaaggcaacttaattgttgaactgtcagatggccgaaccattaatgctggctatgctcgtggccctcaaggcgaaccagggaaagatggcaagtcgccaattatttccactcgagaagtcagcgaagggatcgagatcactgtcaccaacccagatggcagccaacactctcacatcgttcgtcacggtgaagatggccaagctgctcgcatcatttcaactgttaaagatgaacacggcaacacccgactcatctttaacgacggaaccgaagtagtcatttctggttacgaaaacggtgaaaaagatccaaataccggcaacattattaatgttaacctcaccattaatgttgttaaggaaggttcaactgaccaaccaagtcgtgtcttgacacaagccaatatcgacaaccgaggccacttgatcctcacttactcaaatggtgagaccgaagacctcggtaaagtgactgcttctactgaccgaactgtcgttacggctttagtcaacagcgataacgaattgattctggtctacaatgatggcagcacccagaatgcaggtcagattgacattaaagaaggtccacgaggcaaatctgcctacgaattgtggctcgaagctggtaacactggtagccttcaagacttccttgattccttgaaaggcgaagacggtaaagatgctgaagttggtaaagtcgttcaatctgttgatattaacctcgatggcgacttagtgattaactacactgacaattctcagcaaatcatccacaactacccatctagccaagatccgtctgctaatggcattaaagatgctcgtgttgatgcgaacggtgacttgattatcaccttagacgacggtagccaaattaatgccggcaatgttcgcggacctcaaggcgagccaggagctgacggccgaggcatagccaatatccgaatcgaaaataacaacctagtcgtcgtttacaccgacttctccgttaacatcatcggccaattgaccccaagtcaaccaggtgataaccaaccaggtgaggctccaggtcaagaagagccaggtgaatccaacggtgactctggcaaacctgatgataaaccaggtcaagacaagccaggcgaaccaggtgatgataccggccaccctgacgacaaaccaggtcaagaggaaccaggcttaccagatggtgatcaaccagatgatgacgaaccaggacaaaccccaggagacgattccgataatactggtgaaaaaccaggcactgatcaaccaggtgaaattccaggtcaatcagatggtgataacaccgataaacctggtcaaacaggagatgacaccgataagccaggcgaaccaggtgatggtaccggccaaccaggcgataaaccagatcaagtggaaccaggccaacctgacgaaggtaataccgataaacctggtcaaccaggtgaggatacagacgaaccaggccaaccaggtgagactccaggtcaatcagacggtgacaacactgataaacctggtcaaccagatgaggacaccgacaaaccaggtcaaccggacgatgaccaaccaggcgaatctaacggtgacactgacaaaccaggtacaagtcctgaagcacctgaacaaccaggtcaaactccaggcgatgattccgataattctggtggtaaaccaggcgaatctgatgatgtccctgtagcaccaggccaacctggggatgacactgacgaacctggtaatgacgaacctggacaaactccaggagacgattccgataactctggcgataaacctggaactgatcaatcgggtgaaactccagatcaatcagatggtgacaacactgacgagccaggtcaagacaaaccaggcttaccagatggtgatcaaccagatgtggacaccgacaagccaggtcaaccggacgctgatcaaccaggcgaatctgacggagacactgacaaacctggaacaagtcctgaagtacctgaacaaccgggtcaaactccaggtgaaactgaccaacctggagaccagccggcagcccaatcaagtcaaccaactgacggtcaagaccaaactaaaccagtttcaggtagcgaccgcaaccagtcagatgaagaattgacttacacccgttctggtttccctggaactcaaggcagcaaagactttagctttgttcaagacccagaagatgcaactccttctgacaacttgaccaaagatgaaggccaacgtctgccagacacagcaagtctaacttgggtcttaggtctaattggcgcaagctccttaatgggaggatctgccctagccctcaaagaccgcaagcgaaaataatagtcagtcattaacttagttaatgagtctgaaccagagagcttcccagctagcaatagctgggaagctttttgctatacataaaagactggtcaaaatagactttctctatatgacgagctattttcaaaagttgaaactggacaataaatcagaatagggaggttttgcagttgaaactggacaataaatcgaaataaggtattttcaaagttgaaaagcgacaatgggacggccattcggtactttgagagttgaaaagcgacaatggaaaggccattcggtactttgagagttgaaaagcgacaatgggacagccataaggtactttcgagtcaagtctcaaactctgtgtaggttagtctagtattgagaactgagttgcaatgagtcagttctggagcaataacgcgacaattgctgagcaataaaggagttctggcgtaataacgcgacaattgctgagcaataaaggagttctggagcaataacgcgacaattgttgagcaataaaggagttatgatgtcataacgcgacaatcgcccagcaataaacgagttatgaagcaataaggcgacaaccacaaaccaataaaagacttataaaaccggtcactggctaggtcgcccccaacttatcttaaaagaagcgcttacatttgaagccagcaagctagctgtcaataaagcttccccgaccagtaccaaaccaaccccaacttttctgatggcaccctaaacccctcccctccccctatcctttatttcatcatcacatttttatataagacaaggattaactttttcattccatcaatgctatactagtaaggaaaggagtgggacagatggaattagtttacatcgttttaaataagcctgatcgtttgagcgagatactatccctgtttttagaatatgaaatccatggggcaactgtgatagatagtggtgggatgggccagcctgattgccaaccagtcacccatgttttccatgtttgcggaattaaaagaagataagcacaatagtaagatgattatgacggtcgtggacagccaggcagaacgggacttggtcttgaaggctgtggaagacgttctgggtgatattaatgaaccggatactgccgtcttctttaccacccctgtgtctttttccaaggggatggactaccacgaggacgacgaggggactgttgaatgatgaacacaccattatatattgcaattatcttactagctgggctagtaggtggcaggctggcccaagctttgaaattaccgtctgttaccggctatttattagctggttttttacttggacctagtgtctttaaccttgttacccctgaagtcagtgagttttttggcatcgtgacggattttgccattggccttttgtcaatttcggttgggatggaattacaccgaagcgttttgaaaaataacgggcgaaatctcataattatatccctagggaagagcctagtaacttttgcattagttacagccgttacttattttttgggaatgggcttttatcaagcagtgatcttaggggtagtttctttaactatttctcctcctggtgttttggaaattgttaaggagcgcaaagctcgtggagagatgaccaacaatttactcaatttggtggctttagacaacttgacctgtatcacccttttcggtctggtcttgtccctagtcgaatctgctatgaaagctaatttcgtctttactgatgttctaatctctattgtcagagatattggattgggtctcgtatttggtattctagccggttggatctttgcctactttgtcgaaaagcaagttctacaagataaacttttggtaattattattgctattattatgattcataatggtttggcccagctattggatctgtcagctgtattgatggctatcatcaccgggattactatcaccaacttgaccaacaacaccacccgggttgcttcaacctttgagcggatcaacctgccagtcaatgtcatgttcctgaccctgtctggtgcccacattgaaattagcatcatttaccaggttgggattatcgggcttggttacattgtcagtcgctttatcggccgggcaggtggggcctacctctttgccaagttgaccagctttaaagagtcaaccaagcgcaatatcggcttaggcctcgtcccccaagctggcatcgccattgggttggtttccattgctgagcaaaccattccctctatggccgggaccctgtctggtgtcctcttgaccggggttattttcttcgaaatccttggccctctcattgtcgaaaaaggactagagcgggcaggcgaagtaaactagtttttttggaaaaaactgcctgcaagccccctgaaataaaaaccaagactgaaacgagccgtgaaaagaggcataaagatgaaaatccaaatcaaagcgaccccagatatgaccgcacaggacatgatccaagtctatatcttgcgggggcaggtcttttcggaagaacaaaaaattaccgagtcagaagctgaccaagatgactaccaggccttgcatgtcctgttaaaggatggagacgacttggttggttacgctagaatccttgaccggggcgaccaccaggcaattggccgggtcttaatcgctaaaagccaccggggccgaggactggggcggtgtatgctccaggaggtcctggactatatcggaccaggaaaagaagtgagactggcagctcaatcctatgttcaggacctctaccggtctttgggctttaccaaggtgtctgacgaatacatggaagcaggtatcccccatgtggatatggtactggcagaaaaacgtctgccggactagaagacatggggtaggtgtcagattgtgtgctgggttagtgaagatggtactggtccccgatcgtctgccgagctctagaaggtaaatctgcctcttcttttaaagacccgccaagtggttaagaaggctggcaagttaatggctagctagggactagggttttacctccgttttagctccccagctctttctacactgaaagcaaaaattaaactgaacttggtcaaggggtcttgcattgaagataaatgacgattattattaaaattgtaagtaatttgaagatagaatggactgatagggtggaatttctcaatacattagagcaatcaaggtttttattttggctaacggctatcctgggcatggtcttgatttgggggctgggtttatttttcatccggctgattaacaaggctgtccggtccgaccgggtgcaaacagtggtgaacaaggtgggaacttggatcctcctgttcatctccatgatgtacatcttctccttcttgggtgaatcgaactggatgagccgggaaattgtgaccatcggcgatacggaagtcacccccatgctgatcattgtcatcatttttgccctggtggtggccttcaagctgtctaacactatccgccattacctcctgcctccagtttatgaccgctatgaaattgaccggggtcctcgagcgaccattaacacccttctccactacaccattattattgttatgatcgccttctccctctcctcactgggcttcaacttctctagcttgaccgtctttgccggcgttgttggggttggggttggttttggtttgaaaaacatcatgaacaactttatttccggcctcattatcctctttgaccgcactatcgaagttggtgaccgggtagtaattgacgacacctttaccgatatcgaggaaatcaaaatccgctacactatcgtccggacccgactcaatgaacggattattatccccaactcttatttcttggaaaataaattcatcaaccgatctttcactaacaaacgtcttcgagtgacaatcgaagttggtgtcgaatatggggaggatttggacttggcagaagaagaattgatcgagtcgatctatgacctccaggccactaaatatggtaggctcttgtctaaccctttgccggaggtctatgttgagaattttgatgaatacaacgtcagtctagttctctttttctggattgatgaccaggccgagcaagctgagtttgtcttgccttccgaggcccgcaagatcatttacaaacgtttctatgaagctggtgttagctttgccttcccacgccaagacctttacttgcttaacaagcaatttgaaaaccaagccaaataaaaaaagcatgaaccgtcttgtcgagccggttcatgctttttaggtaaagctgtcactttattggaaacaattggtattcttaaacttgggattagaatggagaatgtctcggctttttctcaaaaaatgcatgttattcgagaattttagcaggtttttctcaaacaacactagttatacgagacttccccttcacgtttttaaacaacatgtgttattcgagaatctcccagtatttttctcaaacaacttgtgtcatttgagaatgccacccgcattctccaacggcctattaaaaacctacgttataaataaaaccagtttctcgtaccccctcgctaaccatagccctaacgaaggaaaaccgaacagctttctggctgttcggttttttcttaaaagtttgacatgtcttggagctgggagaagtcgtggctagtgacatcaacaagagaaaacttgccatcttcgtattcatagttgaggacgacacaattgggaaagtcgccttggtattcctcaatttggttgtagtccttccaaatttcataaaagaccttgagggtgatgctgtgggtgaccactaggatggactggccgttatcctttgtcacaatatcctggacgctttggttgacccgtttgatcacatcatccaagctttcgcctccaaattgggggaagtaggtaaaaaattggtctcttggaaccaggtaggacggataagcttcgtaagtgccaaagtcccactctttcaagcctttgaccctggtgtaatccaagtcggtgatcaattctagggtgtcactggcccgctcttgggttgaagaataggcagaatcaaagcgaatgccttggtccttgaagtactggccagcgatcttgccttgttcaatcccacgcttggttaagggggagtcggacgagccttgaatccgtccttgtaggttaaaaagggtttccccatgtctgacaaaataaaagttgcgcttggtcatatggcttgctcctcacatggtttttatgtatctctccccgttagcatataatgactgtcaggattatgcaagccaggtccagcccatgggaaatatcctgtcctaaccaggcctcttttgacccaattcgacttgaagaaaattgcttttagccttagcccaacccagcctctagctaaatttttctcaagttctgatctctccctaaaattaggcccctgttttttccaaaaacaatctcttctatataaatagaccattttcgacccataaaaaagagccaaagcctgggctttagctccatgaaacttattttgcgtcttcagcttcttctttcgcgtctttcgcttcttgaatgacgtcttcggttgcatcgtctgcttcttccttaacgtcttcagcagtgtctttgacttcgctagctgcttttgaagcagattcagaaatgtcgtctttcaagtcttccgcttcactttgaagctctttggaagttttgtctagagagtcttgcaagtctttagctgagttggttagggtgatgcggatgttttcgcctgcttccccagcaacttcgcctaattcttggcctttttctttagcaagctcagcatattcattggctgcatctttcgattcttcaaattttttgcggatatctttacgggtttcttcaccgctcttaggcgcaaatagtaaagcaaccccagcgccgaagagggcacctttaacaaaagatgaaaatgacataattatacctcctagtgtagtagtaaacctattataacctaaaaaatcttcctatgaaatagctttaactcattattctgaaataccattacaaataaattaaaatagcaccaaattttcaattgaagcaggcaagctcgtcctatgtcaaagaaattaaagtaaggaaatggctgaaaagattgacaaaggtgggccagaataagataatgatattaccgttaatgagacgacattataaaaatacccttggtcaaagactttctcattagaatatattaatattcattataccataaaaaatggggtgaatcctcttatgactactaataaaaagaattacaagattatccagtctctagcccgggcctttaccattattaattgctttagccaggatgagagccagctgactttgaatgagatcagccaaaaaaccggcctcaatattaataccacccggggcttggtccaaaccctcctccactaccattacctggcttacgatgaggcggccaacacttaccggctaggtttggtttttatggaaaaagctcggattgcccagtttgaatttaacaaccggctgattaacctggttcgcagcgacctccagcaactagcggatgtctttgccgtttccacccggatgatgtccatcgaaggaacccaggcgcctattgtcatggaagccaaaccctcccaggcaaggtattccctggtcgtccatgagtcaactgagttccccctctatgccacagcgactggcaaactgattttagccaacttggacccggactatcgggaccaggtgattgaccaatttgaatggaaggagtttggccccaacaaccacactgacaaggaaagcctgctgaaagacttggcccagatcaaagaccagggaatctcgattgaaaatcaggaactgggtcttgggttttcctccttggctgtccccgtcttccaagagggggctttagtttactccttgtctttgaccacaacggacgaaatcttaaaggttaagcaaaaccagatgctaaaaggactgaagcaaatccgggacaagctcaaccaagccttggcttctcttgcttaagactcttttgtgtggaccctttacaaagacctttttcctttacacaaaattagcctaaaccatacacattcttatcagaccaggctgggaaaaaatggtatatttgatatgtaactattacatacgaaaaaagaaagcagggtgttccacatcgtgaaacaacaaaatgaaggtgtccaccgtaaagttttgagaaaagtcaagaaacactttgtagctgttaccttatctggacttgtcctagctggtatttcagcccaagatgtccaagcccaagaaggtcaagcaagtgacggaagcaatttgggtcaaggcttagcctccgaccaagctcctgaaggttcagacgatgaagttctagcgactttgagtcaagcggatgaccaggggcaaagtgcattgaatgtttcagcagctgaaggggaaggcgctgacgaccaagttactgctagttcagctgagtcaggtcaagcccttgccaatcctgaaccagaccaaggagtttcggaccaagagccaggcctagctgccgaccccggtcaagcagtttcagaccaagaccaagctagccaaggtcaagcggatgatcaaggccaagaagctgcaagtaatccagttgctgaaggcgaaagctctgaaggagagacagaagaaactcctagccaagaccaaactgcagactcagatgccgaccaaggtcaagaccaagaaagctctgtccaagcggaagccagcccagaagtttccttggaccatgcgccaaacttgaaattgccgcctgttcctgagcgaccagccggcacccgtcgtgcaaccattggctttaccaacgacctccatggccggatcacccgtcaaggggagtctgactacgacatgggcttgggtcacatcaagactatctttgatgcttaccgtcaattagcggacgaattcctcttacttgacgcgggcgacaccgttcacgggactaccctggtcaacctgacagagggcgaaaacattatccgcctaatgaatgaaatgggttaccacgccatgacaaccgggaaccacgaatacaactacggttttgatcgcttgaaagagttggaagaacaggctgactttgaatttgtggcttccaatgttaaagacactgagggcaatgacctcttcaagtcctttaccgaatgggaagttttcggtgaaaaaatcggtattatcggcctagctacccaaggaacctatacttctacccacccgaataatgtagaaggtattgtctttaccgatgaagtccaagctatttccgaccaaattgaagccttgtctgaagaattcagcaagtttatcgtcctttctcacgtgggttacggggttgaccaagaaatcgcccgacaaaaccctgaagtagaactgattatcgggggccactcccacacaccagtaattggtggagcttacgtggacggtaatgacaagaccttgatcacccaagcttgggaacacggtaaattgatcggtctagtccaccttgattttgacgaaaacggcaatattgttcaaaaaactgcccaacaccttaccctagctgagaacttagaccaaatcttagaagacctaccatccagtacggtagggaacccagaagatatcctagctgttgagggcagtgaagaagacccagttatcaaggaaatgcttgaggaaatccaagctgaagtggaaagagaactgggcgaagttatcggatcgactagtgtggtccttaacggggaacgtgattttgtccgacgaggggaaaccaacctgggtaacttgatcaccgatgctgttcgagaatttactggtgctgaaattgccttcatcaatggtggcggaatccgggccagcattgatgccggcgagattaccctaggcgatgtcgtttccgtcctaccatttatcaacctagtggaaacagtcaacgttccaggttctgtcatccttgaagccttggaacacggtagccgtcaataccctgaacaaaacggtggtttcttgcacgcatccggcttgaagtacattgtggatgctactcgtgagccaggccaacgtgttgtttacgttgaagtcaacggtgaagtgctagacccagaccggacctacaatttggcaaccaacgacttcctcctagctggtggggacggctacaccatgtttgccgactatgacgttgaattggtcactggggaattgttctctgatgttctcatcaactacattcgccaacaagacggcccgattgcacctgaaacagaaggccgaattactgttagcgacgaagccttggatgctgatagcctcgctagacttgtggctgaaatcactgacagagatgacttggaaggccagattccagatgagtcagaaactgacccagatggtgaagttgaaagtccagatgaagacggtcaaacaccaggtgatgaccaagaagttgaggatcctgaagaggacggtcaaggagcaggtgacgacagccaaacttcagatggtgacttgactccagttccagctgaccctcaagaagatgaccaagtggttgtcccagctgactacgaaagagctgctaaggcacttgaccaagtcctagccgaaattgaaaaagcttttggccctgactttgttgaccgcttgctggaatctgctagcctagaagaattagcagagctagctgaccgctaccaagcaggtcaagtgactacagaagacttgagtcaagtagccgaaacgagtcaaaaagctggccaaaacctaccagacactgccacagctggctggttactgggagcactcggactgctttccctatcaggcggccttgtcctcactaaaaaagactaatgaagcattcgctttaagcaaagcaccggttgattgccaaccggtgctttttgtgtttgcctgtataggtcagcagcgtttttgtgtaaaacagttgttatttgcaacccaaagctagcccgaaagttataagctgtttttctcaaacaacagatgttatacgagaattttgacgtctgtctagtcaaggtaagtcccaaaagccatcattgcactcaatagactagacctagcatgccaaagtcgacttggaccggtttgaaggctttgaagtaaaaccagcaaccgctagccatttttaaagagggcccaacctgcccttaaatttcatctttaaaacgttttcgctagtgaaatcttagcaagtgtggtaggttgtaggtgtcgaagaatgtataggaaggtgaataaaatggtaaaaaaagttgcgctactgattaacccgattgccggtatgggcggccgggttggtttgaaaggtactgacggcaaagatgttttaaaagaagctcggcgccggggtgctgaacccgaagctaaccaaaaggctgagaaagccctcaagatcaccttggacaaggtcgaccaggttgaatggtttacagccggtggtcagatgggggaagacctcctcaacaaatatgaccaaaaccccgatgtcctatactctggtaaggaagaaacaggacctgatgatacagaaagtttccttaaagaagttttgaaccaggacgacatcgatattctcttgtttgtcggtggggacgggactgctcgtgatgtggcgaaaactattcaattggaaattccagcattagggattccagctggagttaaaatccactccccagtctttgctacttcaccagaaaatgcgggagaacttcttgccggctacctcaatgatgaaatccagtcggttaacgaaaaagaagttattgatattgaagaagaagctttcagacaggatgaagtggtgaccgaagtttatggttacctcaatgttccccacgatgaaagccacatgcagaacttgaagtcaccttcgcctcaaagtgaccatgaagctaaagtttcggcttgcttggacgtgatcgaccggatggaagaggatgtctactatattattgggtcagggacaacccttgttccaatcatggaagagttggacctggaagttaccaagcttggagtcgacattattaaaaacaaaaaattggtgaaaaaagatgcttcagagtctgacatcctagaaatcatcaaagataacccggctaaattgatcgtgaccccaatgggtggtcaaggctacctctttggtcgcggcaacccacaaatttcttcaaaagttctgagccagctggataaagacgatattacgattgtctccactcccggaaaaatcagaaccttaaataaccggcctttcttgatttacaccggggatgctgacttggatgaccgcttgtccggctactataaagttgtggtgggttatgaaaacctcaagatgtacaagctaaaaagagcttaagccaaaaattttagcttacatttaacattggccaccagataggctattgaccaggtgcgagttagtagtggcagatcaagctgactcaagagtagagcttgctggttatagacttggaccctgctttgctagggaatatcgctaatccagggaatgtgcttggatcgtcagagaccatttccatatcacaaagtctcggcaagttgaacatggggcaaaagcaaataagcttgacccaactagccaagttcaccacattttgtcaagctacccaaatccaaaaaaccgacaaacaatttaaaacattaataaaccatttccaaagtaaaccctctaactttaaatgttcaggcctatcccttatcatgccagatgaagggctaaaaagagcctggaagtaagcaattcattttccacaaaagaaaacagggattgccatgcgaattagtttaaacttctggcaataactggtacaatttacttgtacaggctataaggatactaaatagatagcaagtctagacctcagtggcaagagtcacctgactttgctgctagctttttgggctgggaacttagtggccttttctacctatgcttgtgacaattgtttcaatgattttcacaagattttcgcgccatgtgaaccaggcagatataaagtcaagttgacccaagctttatgtaagctagaagccttccgccccattggaagggagcatatggtgatataaagcacagggaggttagaattgtagcagtactgttaaaatcatgttaagattttagcaaactgtttacaaacttgccgaactatagtatctttaaaatgtacagtcattgcaaacgctaccttccgatagtaccggtctgtggcacaagtaaaaacagcagaaataggaggagttttgttaatgaaatcggacattgaaatcgctcaggaagcaacaggtctacctattgaagaagttgctgacaagctagggatcaaacacgacctcttagaaccatacggcaacgacaaagctaaagtagactttacaaaacttgacttagacgcagctaacttcggtaagttggtcctcgtaacagccattacacctacgccagctggggaaggtaaaaccactacctctatcggtctagttgatggtttgaacaaaatcggtaaaaaagcagccgttgccatgcgtgaaccatccttaggaccagtctttggtgttaaaggtggagctgctggtggtggatactcacaagttatcccaatggaagacatcaaccttcactttaccggtgacttgcacgcaattggcattgcaactaacttgattgcagctttaattgacaaccacatccaccatggtaatgaactggacattgatgtgaaccggattgaatggcgtcgtgttgttgacatgaacgaccgtcaactccgtaacattgcaaatggtttaggccgacgtgcagacggtgtgcctcgagaagacggctatgacatcgttgttgcatctgaaattatggcggccctatgcctatcagatagcctctctgaattaaaagaaaaaatcggtaaaatggtcgttgcttacaaccacgacaatgaccctgtaactgttgctgacctacaaggccaaggtgctgcagcagccctactaaaagaagccattaaacctaacttggttcaaaccttggaagggaaccctgcctttgtccacggtggaccattcgcaaacattgctcacggatgctcttctgtcctagcaactaaagtcgcaatggctcacgctgactacactgttactgaaggtggattcggtgctgaccttggtgctgaaaaattcatcgacatcaaagctcgtcaagctgacatcaaacctgatacagcagttgtcgttgcaactattcgtgcccttaaaatgcacggtggcgtagacaaaaaagaattggaaactgaaaacgtccaagctctacgtgacggtatgccaaacttggttcgccacgttaacaaccttaaaaatgtctttggcattaacccaatcgttgcgatcaaccaattcccaactgatactgacgatgaaattcaagcacttaaagaagagtgtgaaaaagaagacatcaaagttgtcctagctactaactttgctgaaggtggcgacggagctaaagacttggcaaatgcagtcgttgaagcttctgaagcaggcaatgacttcaaatttgcttacgatgtcaacgactctatcgaagataaaattgaaaccttggttaaagacatttacggcggtgaaaaagttgaattcacccgcaaagccaaagctaaaatccgtaaattcaaacgtcacggccacgacaaattaccaatttgtatggctaagacccaattctccttctcagatgataagaaagcattgggtgcaccaactggcttcactatcactatccaagacttaactgtttctgctggtgctggcttcattgttgctaagtctggtaacatcatgaaaatgccaggtcttcctaaagaaccagctgctaaccgtatcgacattgacgaccaaggtaacattacaggcctattctaatctactaggatagaagacctgatcaagtctcagattgactaggtctttctctagcctagtcggtcgggataaacatgaatggtaagagaataagaaatcgtgcgagcggatcgctcggtttcttattcattattacctgtctgattggtccttttgacaaaattaaaacaaagagttaggaggcaaaatatggctaaaattttagatggcaaggaagttgccaaggccatccgtgccaaggcaaaagaagatgcccaagccctcaatgaaaagggaattgagcccaagttggctgttttgcgtgtggacgaaaatgagtcctccaaggcttacgagaaatctgccatcaagcagatggaaaaatgcggcattaaagctgaagcccacactgaacttggggttgaaagcactgaagatatgcttgaagtcattgacaagttaaaccaagatgactccattactggcattatctgcatgcaacccttcccagaaggtattgaccgggctcaagtggccgaaaaactccatccctttaaggacgtggatgccttaaaccctgtcaacctagggaaattattaaacaatgacccttcagctatggctccttccactgcccaagcagtgattgagatcttagactattatgactatgacttagaaggtgctgaagttgcggttgtcggttctagcccagtcgttggtaagcccttacaagtcatgttaaccaaccgcaatgcgacaatttctaacacccatgtctacaccaaagacaattccatccacaccaaattagctgacattttagtttcagcaacgggtgctttgggactgattggccctgacctggtgaaagacggtgcaactgtgattgatgttggctttggttacaaggacggcaaggcaacaggggacgttcgctttgacgaagtagaacccaaagcttcagctattaccccagtccctggtggtgttggctcagtcactacagccgttttagcttcccaagtgattaaaggaaccaagctattgcatgatgtagattaggtggtgccctgatgaaagaactcaaagtaaccgactttgtcaacaagttagcctccaacgacccaacaccaggtggcggtgcagctgctggtgtgacggcaagtttaggaattgctgctatcttgatggctatgcggttctcaaccaataagaagatgtctgatgaagagagggccttcttaaaagacacgattgaccagtatgaccaaagcaaggaccacttcatcgagttgattgaccgggatgcaagtgatttcgaacccttgtcccaggcttatggcctgcctaaggagacagacgaggaaaaagaaaaacggaaggctgctatccaagaaggcctgaaaacaggccagccagcctccggtagaactcttagaagaagtggaggccgtttgccaagatctagaaaaagttgtccctttgatcaagaaaagcattatttctgaccttggtgtgggcgtgcaaatgctccggtcagccatctactcttcttcccttaacttaaacattaatgccggtcaattgaaggacccggacttgagtcaagactaccggcaactcgcaacagacaaggttgaccaattagcccaaacacttgatacgatctaccaacaagttcaagctattttagctgactaagttagtccaatacggaacaatacaaaggagagatcatatgtctgaagcacaatttgacgaaaacggattgaaaaaaacgcctctatacgattactaccttgataagggtctaaaaatcaccgactttggtggctggggccttccaatccaattcactaaaatccaagaagaacacgatgcagttcgtgaaaaagttggtattttcgacacttcccacatgggtgagattgtcgttaaatcaggcaaagaaaatgcctttgactggttcaacaccatcatcaccaatgacacccgtaaaatcaaagaagacggtaaggcacaatacactgcaatcattaaagatgatggcggtatgcttgacgacatgatttactaccgggttaacaaagacgaattagttgccactccaaatggtgccaacactgacaaaatttacgaatggttggttgaccacaacaaagacggtgctgttgaagttgtcaacgaaacctttgactggggcttaattccagttcaaggaccaaatgccgaagaattggttagccgcttaactgatgctgacctggcttccattgaatactactcttacttgcctgaccaaaccctagctggtgttgataatgttcaaatttcacgtaccggctatactggtgaagcaggtttcgagctttacattccttacgatgatgtcctaaccgtttggaacaaattgctggaagaaggccaagacttaggcgtaactgaatgtgcccttggtgctcgtgacacccttcgtcttgaagcaggacttccactttacggtaacgactttgacgagtcggttaacccagttgctggtggggttgcctttgcagtgcctaagaaaaaagaagttgactacgttggccgcgacgctattgttgcttaccgtgaaggtgaccaagttaaagaaacttctcgtggtttcactgttgacggcacaaaaattccgcgacaaggcatggacgttaaaaacaaagacggcgaaaaaattggtgtggtaacttctgcaaccaaatcaccaacattcggtaacccaattggtttcatccgactcgaccgttcttacaaaccaggagacaccgttattatcgatgttcgtggtaaagacgttgaagcaacattgaacaaaaaagattggcttgacaacaaataaagcttcattattacactataaattttgcttatttaatgttaaaatgatggtgtaagaaaaatcacacacacacaaaaaaggggtagttaattatggcagaagtatattatacagaagatcacgattggattgaaatcctagaaggtaagaaagcgcgtgttggtattagtgaatacgcagcagaagaattaggtgacattgttcacgttgaacttccagaagttgacgatgaattcgatgctgacgaagagatcgggacagttgaatctgttaaatccttctcagaagtcgtccttccatttgctgtcaaagtaactaaaatcaacgaagacctagaagacgaacctgaaattgtcaacgaagatcctgaaggtaaaggttggttcttcgaagtcgaagcagaagatgaaattgacacatctgacttatcaactgaagacgacacagacgaataattgatcgactaatctaatgcaatcagattaaggtcattaagggggtgtttgtcgcagggaaccacttgtctgagtgctggcataaacacggcaggaagtgcccagttagctttttactgggttcagccttagtgcccaagacttgacaggtttctttccggcgacacacctcctatgtttttctggtaattgttagcgttttccgtccttgagactaggtccttctgtggcgaccaaccagcctaacccagatactatttggcataagatcattgcagagaacgaaatcaaacataaggagtgtagaatggtgcattttagatatttaccaaatacagataaagaccgcgaggaaatgttagatgtcattggcgccaaagatattatggacctctaccgggacgttcctgaagaagtccaacgtaaagagccaatgaacttgcctaagcctttgtcagaatatgaattgctaaaagaagctaaccgactagcttccaaaaacacaacttctaaccaagttccattcttcttaggtgcaggggtttatgaccaccatgtgcctacagttgtgaaacacgttattatgcgtcaagaattcttgactgcttatgtcccttaccaaccagaagtttcccaaggtgaactccaagccttgttcgaatggcaaaccatggtagctgagttaactggtatggacctagccaactctggtctatacgatggctacactgctatcggtgaagccaacaacctagctatcggtcaagtccgtaagtcagacaaggtcttgatttccaaagccgttaacccacaagggatccaaaccgcaaaaacttacggctttggtaaaaactatgacgttgaagaagttgaattaaatggggatatcaccgacctcgacgacttgaaagctaaacttgataaaaatgtagctgctgttgtcgtccaataccctaacttcttcggttctgttgaagacttaaaagcgatcaaagacctacttgaagactacaaaaccctacttgttgtttcaagtaacccacttgctcttgctaagttggaagcaccaggccacttgggtgctgacattgtcgttgggaacatccaaccatttggtatcccaatgcaattaggtggccctcacagtggttacttcgcagttaccaaaaaattaatgcgtaaggtaccatcccgtctcgttggggaatctgttgatgaagaaggcaaacgtggtttctccatggccttgtccactcgtgagcaacacatccgtcgtgaaaaagcgacatccaactattcttccaaccaagccctctttgccctagcttcagcagttgccttagctgcttacggtaaacaaggggtccaagaacttgctcaacgcaacattaacaatggtcactacttggctaaacagctacaagacaaaggttttgaacttcttaacagccgtccattcttcaacgaatttaccatcaagttagacaaagacgttgaagaagttaacaaagccctttacgacaaaggctatgtgggtggctacgatgcttcagatgcactggaacaagagggtgcctacttgcttgtggcaactgaaaaacgaacaaaagaagaaatcgacgactttgttcaagctttagcggaggtggctaaataatgttaattcaggactatgataaattaatttttgaaatttctactgaaggccatactgcttatgaccttcctgccagtgaaatcgaggattacgatttagactcagaactgggcgattactcccgtaaagaaccagcaagactcccagaagtgtcagagttgcaattactccgccactacactgccttgtctaaccgtaacttcggggttgaatcaggaccttacccactcggctcctgcaccatgaaatacaacccgaaagtcaacgaagaagtggctgctttagatggcttttcaaacatccaccccaaccaagaccctgaatctattcaaggggcaatggagttgatgtataaccttcaagaatacttgaaagaaattactcaatttgatgcggttaccttgcaaccagcagcaggtgcccacggtgagttggcttctatcctaaccttcaaagcttactttgaagcaatcggtgaaggcgaccaacgtaaaaccatccttatcccagacactgcccacgggaccaacccagctactgcagtggttgccggctatgacattgtcgaactcccttcaagagaagatggtttgattgacgtggaagctgttagagaagcagctggacctgatgttgcaggtatcatggtaaccaacccatccactgctggtctctttgaacaagatgccaaagaaattgcagacatcatccacgaagctggtggacttgtcttctacgacggtgcgaacttgaacgccatcatgggaatttcctctccagcagcaatgggctttgacgcttgccacatgaacttgcacaaaacctttaccggccctcacggtggtggtggaccaggttcaggcccaatcggtgtggtcgaaaaactagcaccatatattcctggaccaaacgtggtcaaagatggcgacaaatacgtctttgaaacaccagaaaaatcttacggccgaatcaaaggtgactttggtaactttggtgttaatgtccgtgcttacaactacatccgagcaatgggacctgaaggcttgcgtcgtgcttctgaagatgcggtcttaaatgccaactacctccgtgcccgggtcaaagaccactacaatgctccatttgaccaatttaacaaaaacgactttgtccttgacttgaccaacttcaagaaagaatacgatgttgtggccaaagatgtagggaaacgtctccttgactacggtgtccacgcaccaaccacctacttcccacttatcatccaagaatgcctcatggttgagccgactgatacagagtctaaacgcgaccttgactatacagctgatgtcttcatcaaaattgcggaagaaatcaaagaagatccagaactggttaaatcagctccatacaacaccccagttcgccgtatcgatgaagctcaaacctcacgtaaaccaatcttgaaatacaattttgaagaccacgaatcaccagcagacagcaagtaagctagcgtgaaagtggcttcagtaaccaggattgaggactagctcaagccatccatccttaagctttgaagccaagctcaagccaagcaagccccagcacaagttgtgctggggttttgcttataggagaatggttggagtaggttggtgggtggaatgctagagacgaaattctataattgggggacgaattgtagaattatgagactgagtttctataattggggctggattgtagaattatggagtggagattctataattgtggctggattgtagaattttgggttagagattctataattgtggttagattgtagaatttacacatagatttggacttgacttggaggtcagcccgatttctggaaaaggctcattttaaaatacaaaaattaaaacttagtgttttacgagccaatcgaacagaccttttaattggcaaagttttttacttgcaatttacttcgttttcgatatacttctaaatagtaagtgaattaaaaaggagtggctattttgaccgaatttagcgaattgctagaaagtcgacgatcagtttacaacttaggtaaggaaactgacctgtctcaggaatagatcgtcacaggcatccgccatggcgtccacaataccccatctgcctttaatagtcagacaagtcgtgtggtcgttctcttcgatgaagcgaagacaaaattctgggaccacatttacgagacccaaaaagatcttttgcctgaacaatctaaagacttcttgttaggtgctattgaaaatgctagagatgaagctttaggaacagcgctcgtatttgaagaccacgaagccctagaccaaatgcccgcgaatgaaaatcggaccaatgtctacaaagaccagaactcagccatggtccactatgcaatttggttgcgcttaaaagaattgaacctaggtgctagcttgcagcactttaacctgggctatgagcagggctttgatgcggaaaccagaaaaatgtttgacctacctgatacttacgaactagttgctgagcttccatttggttccatcaatgaaccagcccaagaaaaagaccacattgacacccacaaggaagttcaagttcgaatcgaaacttcaaactaaattagcaaataaggagcaaaccaggtcctggcctggtttgtttttttagaataaaatgaactgcttgcctagttcgactcttgccttttgcctgcctgccaaaaccgcaaaatagttgaatcctgctttaataattggtatatttatggttagaaaaatgattgattacgggggagcgactagtatggcagtttggattttgcaaataatcattggcctcgtcctctttgccatccactacggtgtcatgactaggctcacccccctggtctaccgcccgcaattcaagtggtatagcattgtcatttttgccttgctccttttaacccaggcctggacttggttctttacttggcccgaaagtttctcaaccatcttgcctttaaccatgtatgccagtattttcgctcctttatttggggttttgatctaccgggtctttcgctacctgaccaacccagaccgagacttgcaagtgaaatggcgtaacctcatgctctttacctatatcttactcttgcttatattgttatattttggctacttcgttttcgacttaatcttttactagactttggtcgaagtctaaaaaccaccgcttttttcggtggttttttgcttatataccatttagcctgagggggttgctagcgccattttaagtagttaggctctggtgtggttttggattttgctgctgattagcttttccccttttctctcacgatttaattgtcaagtgactgtaggatttgggcttgactgctggattttaaaaattattgtttaacatatgttatttgagaaaaatgttgaagaattctcgaataacttaagttgtttgagaaaaaacccaaaagattcttaaacaacaatagttgtttgagaaaaccagcaaaatattctcaaacatgatctcaagtttgagaataacagaatttattaaattgccaaggcttaaaacagctgatttttttgataccgaccaaagattcattcatggtatactaggctaaatgaccgacttaggggagagagtgagtacatgttttccaaacgtttaagagatcttggcctggcccatcaaatttttggccagggctataatttccgccaggctaaaattggcgaccagcttattgaggaagtcaaccgggccctggatgaaatgggggtccaacccagggaggtatactcgctcaagcaggaccacactgaccaagtccgactggctgaccttgtatctggggacccttacattattggccgccactttgaccaagcagatggtttggtgaccgactatagcaatgttgccttgctggttaagtttgctgactgcaccccagtcctcctttatgacccggtcaaccgggcccaagccttggtccattctggctggcgggggacagccaagcaaatttctcataaggccctccagctgatggtcgaacaatacgggtctcggccagaagatgtcctggcttttgtcggtccttccattgaccaggaccattatgaagttgggctggaagtgtatgatgccttttcggaaaacccagccagggactgtttttttaaggctcaaggagataagtatttactgagtatgacccaagccaaccaggccttgctccttcaagcgggactgaaagaaaaaaatattgaagtctgtcaagtatcgacttacaacgatgaccgccttcactcggcccgtcagatggggccagactaccagcttaacgccatggtttccatgatcagcccccaagcttagctggatggttagcgggaagtgtccgtgttaaaatagctttccaaacaaggcaggtttagccgacaacttagctcgtctaggtttagctccccaaacaaggcaggtttagtcgacaacctagctcgtctcggtttagctccccaaacaaggcaagtttagtcgacaacctagctcgtctcggtttagttcctccaaacgaggcaggtttagtcgacaacctggaccgtctaagtttagctccgagacaagctagggttcggattcgccaaactggcatccttacccgactagccctcagacaaggcaggtttaacttgcctaccaggcccaatccattcaaggaagtcatttccacagcaaggggtcaaacttgatttagacccccagattaaataggataaaggaaagcatgtcagtttacaggaggtaaaagatgaaatttttcctagataccgcaaatgttgaagaaattaagcgtgtcaacgacttaggactagtggatggtgtcaccaccaaccccagcctgatctccaaagaaggccgtccatttgaagaagtgatcaaagaaatctgtagcgtagtggatggtccggtttcagcagaagtggtcggcttgacctatgacgaaatggtggcggaagcccgccaacttgcgcaatgggccgacaatgtggtagtgaaaattcccatgaccgaagacggattaaaagccgtcaacaccctatctcaagaaggaatcaagaccaatgtgaccttgatctttacggtctcccaaggcttaatggctgcgaaagcaggcgctacttatgtgagccccttcctagggagactggacgatatcgggtcagatggcctgggcttggtggctgacttgaaaacagtttttgacaattatgattacgacacagaaattatcgcagccagcatccgccacctgcctcacttggaagggtcagccttggccggtgctgatattgccactattcctggctctatcttccctaaactctggtcccaccccttgaccgactctggtatccaagccttcttagacgactggaaaaaatttgaagacagccaaaaataaggatattgtgcttgttggctgaagccacaatagagctactgcaaaagcaataatccactattcaatcaaactgaaccgggtcaggccttgtgcctggtccggttttttatcttctattcccggctttctccagggtcaaaagaggttcaactttttaaagataccggtttccagtcaatagcaggccagtcaagtctagctagccagtcctcttgcaggcctggtcagttttcctaaaatactttgatattcttattataatttcatataagggagttgtcaggtcagtattgaaaacgaattcatccttttataaaataatattgtaacgaaacaaagagaggatgctttccatgaagtttttacgttcgacactgggcttcttcttggccggtttgatggtcatgagtatctgggatgccttttttatcccatatggggtcttcgggggctttctagctgccttgattattatcttccctatgtggtacttgaaccactacattggccttatctacgaagcacccggggctggttatattgatatggggcttgggattggcatgtccggtcttttccgtgactttttcatgaacggggcggacttcggcctcttagctgagactttacccaccttgttatttgtgattgtcggtgcgattattggtgggattattgccgcagccatcgaaaatgatttgaaagcagatgaggactcagagaaaggcagtgaaggctaatgccattgacttcagctattacaaccatggttggggctgctcttttcccccttatgattcgtttggtatggggcaggttcgtcgatgacatcggtccacttggtggactcttggcagctggttttatcgttggcctgatgtggttggttaaccacggtattccctcaggtggccttattgtccaaaccggtgcctgggtggacatgggtcttgctgctggggtgggttgcttgaccgcagaccttttgaccagtgaccacaaatttgcaggggccctgccaaaaattctagcagccatcctaggcggtcttttagccggacttgttttatcctttgccctttaaacggctaaagtaaggcaagattaagactagcaaagaccaagttagacaagcgaaaggacaagtgtcatggaagaatacatcctaaccattgaccaggggacgaccagttcccgggcagtcatttataataaaaaagcagaaactgtcgggagttcgcaaaaagaatttccccaatacttccctcaagacggttgggtcgagcacaatgctaatgaaatttggaattccgtccagtctgttatcgccggagcctttatcgaaagtggtatccagcccaagcagattgccggcattgggatcaccaaccagcgtgaaaccaccgtcatctgggacaagggaaccggcaagccagtttacaatgccgtggtctggcagtcccggcaaaccgcccacattgctaaccaactgatcaacgatggctaccaagacttgatccatcaaaagacaggtctcattatcgatgcctacttttcagcgaccaaggtgcggtggatcctagaccaaattgaaaatggtcaggaaagagctgaaaatggtgaactcctatttgggaccatagatacctggttggtttggaagttgaccaatggcgcggcccatgtgaccgactacaccaatgcagcccggaccatgctttttaacattaaggacttagaatgggaccaggaaatcttggatatcttgaatattccaaaggtcatgctaccggaagtccggtctaactctgaaatttacgggaaaaccgtttccttccacttctttggcaaggaagttcccatctccggcatggctggggaccagcaagcagccctctttgggcaaatggcctttaaccctggtgaggtgaaaaacacctatgggaccggggctttcattatcatgaataccggccaggaattaagctactccaaaaacaacctcctcaccactattggctacgggattaacggcaagatcaactatgccctagaagggtcgatctttgtcgccgggtcagccatccagtggatccgggacggtctggacatgattgaggactcagcagagtccgaaaacttggccaatgaatccaaaaataatgatgaggtctatattgtcccagcctttaccggtctcggagctccttactggaattccaatgccagggggtctgtctttggcctcacccgggctaccagcaaggcagactttgtcaaagctaccctccagtctttggcctaccaaacccgggacgtgattgataccatgatcaaggactccgaagtggacattgccttcttgaaggtggacgggggagcggccctcaacaactacctcatgcagttccaagcagacatcttaggggttgaaatcaagcgggccaaaaacttggaaaccaccgccttaggtgcagcctacctagctggtttggctgtgggatactgggaggacctggaagaattgcagaacttacaagaagtaggccaatcgtttgaacccaagatgaacgatgctaagaaggaaaagctctacaagggttggaaaaaagcagttgcagcgacagaaaaatttgctgaaatagatccagaagactagctagacagaggggcaaaagacttggttaaaaagtggccacacaatctcggactaccttagtgaaatggctagcaaaatagctgagccgggttaagaatcaggactactttttgaccccgtaccagccctagtgaatgagatggttatgtgaatacgatagaaaaggtgggtttatgaacttatcaatcaaaaatcgacaggaaagcctggaagctcttgccagcaagcactttgacctcttgatcattggcgggggaatcactggagcaggcctagccttgcaagcggcagcatcaggactggaaacagccctgattgagatgcaggactttgccgaagggacctccagccggtctaccaagttggtccacgggggaatccgctacttaaaaaactttgacgtagaagtggtttccgataccgtcacagaacgggcggttgtccaacaagttgccccccacattcccaaggctacccccatgttaatccccgtttttgacgaaaaaggggccacttttgacagcttccgcttgaaggtagccatggacctttatgactccttagctggggtcaacaatactgaccaggctaactatgaaatgacccgggatgaagtggctaaacgtttaccagaattgtccaaagagaatctcgttggaggcgggaactacctagactacagcaactcggatgtccgcctagtgattgaaaatatcaagaaggcccatgaagatggagccgttgtggtcagccgtgtcaaagccattgactatcttttggacgacaatggacgggttaaaggtgtcaaagctcgggaccaactcactggacagaacttggacattcaatcgcggacagtggttaatgcgtctggtccttggagtgaccaagtccgcaacctgtcagctactgacaaggaagaggaagtccaccagatgcggccgaccaagggggtccacttggtaattgatgactccctgctcaaggttcctcaacccatttattttgacacaggcttgaatgatggtcgaatggtctttgtcattcctcgcgaaaacaagacctactttggcaccactgataccgactaccatggcgacttaacccagccgagcgttagccaggaagacgtggactacctcttggatgtcgtcaaccgccgcttccctaaagccaatatcaagctaactgacgtggaatcctcctgggctggactccggcctcttatcgcgggcaactcgtcttccgactacaacgggggagacagtggtaagatcgaggaagaaagttttgaccgcttgatccaggtggtcaaagaatacctggaagaccaggctagccgggaagacgtggaagacaccgtggctaacttggaagggtccttgtctgaacaatccttagacccatcagaagtttcccggggcagcaagctagacgtggacgaaaatggtctcatcaccattgctggtgggaaaattaccgactaccggaagatggctgaaggtgccttgaaaaaagtggccgagatcttgcgagacgacttcaaccgaccattccgcttgattaactccaaaacctaccctgtttcaggtgggcaaattgacccagctaatgttcaaaatgaattggaccttcttgtgcagcaaggggtcgagcgaggctttaagcaaaaggatgcagagtacctcaccaatctttacgggtccaatgtggagaagatatattcctctaaaggggactttccggaagatgaccgcttagaaagccgctacctctactccctctactatgccttggcccatgaagccatcttgaccccagtcgacttcttcttaagacgaaccaacctcatgcttttcaagcgggaccaagtggacaagatggtagaacccgtcttggacatcatggctgactacctgggctggagtgaagaagaaaaggaccactaccaaaaagacctagcagaaaccctaaacaaaaacgacttgaagtacctgaaaaaataaaaatcatttgaagcaagcaatccccagcaagcacttgagagtggctgggggttttgttttgggagtgggaaaaccttgctgaaactttcatatcaatagccttgttggtttgttttctcgtgcttggtaataaatccactgaggccattcattataaatttaaagattgcttagacttgtactattcttaaactttagattatactaaaggggtaaaatggtcttttattctttctgtaggattaggggactttacgcttttaaactgaccagcaaagtgaataaattttgggattagatcaaataactttggcttagcaaaggggatcttttactgtctttcccgcataggcgggggtgatcctggctagtaaggttaagataccgagcatagtttatttgaccgctcccccccagaccaattaaaaataccccaccgcttagcgggaggggtatttttgcgcacgttggtaaagccacaaagttaaaaagaaagaaagaatatgactgtaaaccagtcacttagaaacaaaaaagaaaaggaattgtaggggttggtggccccggttgatttgacgagtgactagttaaaattatcctagttatcgtcagttatggctgctagatgggttgcggctgttcatgataaaacaagcctgaacccctcacctatacgcgcacaaggagctataactcctgtcttttattatatagtgaattgcgggaaaaaatcaataattaattttaaattagcatagccatcttgcaagaatgtgggagaaaagtgagcaagcttttttcttaagaagtgagtcgagagtttttctgtaaaaagtggcaggctgtcacaagcttttagggattaactacagaaataaaatcttctttgggtcaacaaaaaggcaaaaatgggttctgtctgagtctagtttgcacttggcctgatgacattcactatttttgccaagacctaatctttgacactttattggaataaaaaccattacaaatcgtgttataacaagcattataacactcaaaaacttgagaaagttttcgtaccaggggacttatccttactaatgaactatatactaaactaattatttaagagttaaaatgttagtgggtttctaaattctcattgtccaagctttaagcttcttttttatttttcgtttttgaccttggcgatttaataaatgtcgttattctcaaacttggggtcaagtttgagaattatatgctgaaattctcaaacaacaaatgttatttgagaatttcagtgcttttttctcaaacaacttaagctattcgagaatcatccaatatttttctcaaacaacaaatgttatacgagaatttttaaccttcgcatcaaccaagcttaaaatgcgacaatcactagatacaaggagtcatggaatggaaggcgacaattgttggttaccggcaaaaaagcactgaagtagaaggcgttcaaagtcagcttggttaaaaagaaatcttattgaaaggctatccacatcgataaaggacagtgtaactgccacaaggctaaggccaaaaaactatcaagctggggactattacaagtgaccttggtgagtcctttaacatgttcaatttggttagagcctttaatttccaaaaaactttcaataacgatgcttgacagagaagaaggtccagtataaaatttaaatcgtaactattacgttttaaatcttcaatttaaattttcgacaaacccacaaaaacaaaaacaggcaagaccaatgccttgcctgctttgtccggcctctatttgtctaagactttgcggccgttatagtaaccatcgggggatatccggtgcccaaccctgtactctccagtattgggatcgaaagaaaggtttggggtcttcaattttttgtgggtccggcccttgtttttacgcgcacttgatcgtcgtctttttggaacagccatggtgtaacctcttttctttataaatcgtaatcattatgttttacatcttataggaggcagagggaaaatacaagtctttttaaaaatttaccaggagaaaggaaaatgaccatatggattattttgaggccaagcggaagaaagaacgagggatgagcaatgctgagttcttaaactattactaccctgaactggttaaaagcaagaccattgtgattgttaatattgatgaaaatgatattatctcaacctaccaaacctcagattcccagatccggagtgtgggcatgctagaaattgccaaaaagcaaattctagacgatatggaaaatgattagctctgggctcacacttccaagttagcccagtaatttgatcagatatcccattcttacgcccaaacaaatcattcctctttataaccccctaggctcagcctagggggtttttgctataccttttgaatgtctgttttcagttggccagcttcttcgacttgcttagcgatttggaggaggaggtagtccgcacctttccgggaccatatttggactccaataggccaaccttggtctgtttggtagaggggaagggcgatggagggttggccggccaggttaatatgagagttaaagcccatgtaattgtggctgggtgtgaaatattcccagagcaggtcttgttgttggtctgggtctaggcggtcaatgtttttgatctggttaatcaagtcttggtccgggtcaaattgtccctgcttgggagctggaccattggcgatagggaagataatggcatcgtatttttggaaaaatttttctaaatagacactagtttggtcccactcatccaaaactcggcttaaggcagtggccttaacatttttcccagcctggctcatcaaccaggttagaggctccacatcttcaaattgaataggacggcccaagctttcttggattccgtctagcatattggctgcctcaatggtgttcatcatgtaatagcccttgaagcttttggcaatatcaagaccggggtcatcttcagttaagttgtgacccaatctttccagctggtccttggcaaaaagtatagcagaccgagccaagtcagataggtcctggcccataactccttcgagggaataagcaattttaagggggcggtttaagtcggttaatgcttcctgggtgattttagggaccataaatggggcttcatattgttcagcttgaaggacctttaagagggcccaggtatctcggacagaccgggtcaggccaaagttaactgtcgccccttgccagccccggtagccatctggacctacaatgatccggccccgggaaggtttgagtccgattaaaccggtatagctagctggtatccggaccgacccacccccatcactggccatggctatagggaccatgccggacttgagggctgcggctgctcccccgctagacccacctggattgtagccagtttggaagggggactggacggggccgtttgccttggaatctgaaacgcccttgaagccgaattcaggggtattgctggtcccgacgacaataaaacctgcatcaagcaaggcctgggtgtagtggttggtggcatcagggacaaagtcctggagaatttcggccccggaagttgaccggacccccttcaagtgttggcccaggtccttgagtagggtggggatcccgtaaaaggctggcaggtcagctctttggtcaggagttagcttgcctaggagggcagttttttccctggcctcttggagggcgttctcagcaatgacagtcgtgacagcatttaaggtcgggttgagctttctaatattttccaaggccgcttccaccaattccagcggggtgacttggccctttttcacttggtcggcataataacttgcatcctggctaaatagcatggtttcctccttgtttagcttggtcaacttttcgcctttagtctagcaaagtttttccgggtccgcttgcaaaacaggcgccatctttgccgaaagatgtttacaagtcttgcagcaggtctttttcatctaagggctttcaggcaaaaaaccgggttaaaagctggtctagaccgaattctaactatatttattgatagatttttgatagaatatggggtgcactaatctagtaagtgccagctgataaaaacaattttgtcttcaaaccctggcactttaaaaaaacataacttgattaaaaggagcaggtaaatggacgttcaagcttttcaaaaacaggtaaaagcagacggttttgaccttaaccaggaccagttagaccaatttgaccggtatttaaagctcttgcaaagatggaatgaaaaggtgaacctaactgccatcacccagtcagaagaggtctacttaaagcatttttacgactccatctgcctggccaagtatgtggacctagcctctagcgactttagtctatgcgatgtagggtctggagctggcttcccttccttgcccttgaaaattttgtttcccaatctaagggtgaccattgtggactccttgagaaaacggattgacttcttgaaggtcttggtggaagaattgggcttgactggcgtggacctctaccatgaccgagccgagacttttggccagaacaaggacttccgggcttcctttgactacaccaccgctcgggcagtggctcggatgaatgttttggcggagttgtgccttcccctaaacaagttaggcgggacctttattgctatgaaggcgagttcggctccccaagagttggaagaggccaaagcagccattgctacattaggggggaaggttaggggggatgcggcctttgacctgccggaagatggtggggagcgccacatcattctaattgacaagaagaaggaaggtcccaataaatacccccgaaaacccggaacaccaaacaaaaaacccttgtaagctttagcttttctagggttgtatttttagtaaaaaacagaaagacaggaaagcggagtgaaattatggcaaaggtcattgcaatagcaaatcaaaaaggcggtgtgggcaagaccaccacatccgttaacctgggtgcttctttggcccaccaaggcagtaaggttttactagttgatatggatgcccagggaaatgccaccagtggtctaggcattaaaaaaggagatgtggatgctgatatttacgacgtcctcatcaatgaaaaacccctggatgaagtgattatcccaaccagccgcaaggatatggcagtggctccggccaccatccaactagccggtgccgaggtggagttaaccaatattatggcccgggaaacccggctcaagcgggcgattgacgaacttaagactgattttgactacatcatcatcgactgccccccttccttgggtcacttgaccatcaatgcctttacagctagtgattccattatgatcccggtccagtgtgaatactatgccctagaaggtttgagccagcttttgaatacggtcagactggttcaaaagcactttaacgaaaacttgagtattgaaggagtcctcttgaccatgctcgatgcccgaaccaacctgggctttgaagtggtcgaagaggtcaagaaatatttccgcgaaaaagttcacgaaactattatcccccgcaatgtccgcttgtccgaagcccccagttacggcctgtccattatcgactatgatttcaagtctaagggtgcagaagtttacctggctttagcagaggaagtgaaagcaaatgagcgagcgcaagcgtaaaggtctagggaagggaatcaacgcccttttcccagatgctgctaatttggaagagaacattaacactagcgaagagcgggtggttgacttagccgtggctgacttgcgacccaacccctaccaacctcgccacgactttaaccaaaacgccttagaagaattagccaaatctatcaagcaaaatggggtcttgcagcccatcattgtcagaaagtcccaggtcaagggttatgaaattgtagcgggagaaagacggttccgagcttctaaaatagcaggactagagacgatccctggcattgtccgggactttgacgaaaaggtcatgatgcaggtagccatcttggaaaacttacagcgggaagatttgaccgctttagaagaggccgacgcctatcacatgatgatggaaaaactttccctgacccaggaaaaggtggcccaagaactaggtaagagtcggtcttacattgccaaccacctccgcctccgcagtctgcctcaagctaccaaagacctcctccaagacggtagcctgtctatgggacaagcccggactcttttgggcttgaaagatccaggagctattaaccgcctggctaaaaaggcagtgaaggacaagctaacagtccgtcaactggagcaggaagttgctgactttaaccaagaaggcaagaaaaaagccaagccagctaccaagcccaagaagtcaatttttatcaccgatatcgaacgacgcctaacctcgcagatggataccaaagtcactattatcggtaaggaaaacaagggtaaaatccagattgaataccagtctttagacgacctgaacgacattctttacaagcaattgggcttggaagaagaatcctaagtctaggctttggttgaagttggtaatttgtttgagcctgggttaggattagattagattggactggacaggctcgtactggattggacctaacctggacttggatttggacttggctggcctggctagaaattcgacaattctgggccaattgtagaatattgaagcggaagttctacaatcacagcccaattgtagaatattgaagtggaatttctacaatcgcagactaattgtagaatattgaatctgaaattttacaatcgcagaccaattgtagaattcgcccaaagcttaggcctggttgaccaggcagaaatttttgtcaacgagcaagttggcagcaaagctagcccagacaagaattttgtcaacgagcaagctggcagcaaagctagtccaggcagagatttttcaacaggcaagcaagaatgacctgacgaatgttaaccgaagagtgataattcaaattcgaacttagaaagtgagtgaggtatgatgacagacaagaactatgagctccacgataaagttgaaatgaaaaagccccacccttgtggcaccaacgcttgggaaatcatccgcatgggtgctgatatcaagttaaaatgcagtggttgcaaccacctagtcatgatgccccgtcgcgagtttgaacgcaagatgaaaaaagtgatttaaagccgggagctggggggaagtcaagctttgcttcctaggtcttatggctaaatgtcttcgctattaaacgactagaaaatcaaaaagaaaaaggatgacgcatgaatggcactaacagcaggtattgtcggcttgccaaatgtcggcaaatcaaccctatttaacgcaatcaccaaggcaggggcggaagcagcaaactaccctttcgctaccattgaccctaatgttgggattgtcgaagtccctgacccaagattggaccggttgacagacttggttcaaccggaaaagacggtcccaaccacctttgaatttaccgacattgctggtatcgtcaaaggggccagccagggagaaggcttgggcaataagtttttggccaatatccgagaagtcgacgccatttgtcatgtggttcgttgctttgacgacagcaacattacccacgtagacggcaaggtggacccagcttcggacatcgaaaccatcaacttggagctcatttttgctgaccaggaatccattgacaaacgttacgaaaaaacccgcaaacaggccagagccaaagatccggatgctgtagccaccctagctgttttagacaagatccgacctgcccttgaagaggggattccagtccgggctttggattttgatgaagaagaggaaaaaattgtcaaaagccttttcttgttgacctccaagccggttttatacattgctaatgtggcagaagagaacgtctcagatcctgaagccagcgactacctgcaaacggtcaaaaatattgccgaccaagaaggggcagaagtcgtcggcatttcagctgccatcgaagaagaaattgctgccttggacgacgatgaacgggaccttttcctagaagacctgggcatcgaagagccaggtttgaaccgggtcatccgccggtcttataacttgctgaacttgggaacctacttcacagccggtcctaaagaagtccgagcctggacctttactaaggggatgaaggctccgcaagcagctggtatcatccactctgactttgaacggggctttatccgggccgaaaccatttcttatgaagattttgatgacttgggaagcgaaaaagctgcccgggaagccggtaaactccggcaagaaggtaaggactatgtggtccaggacggcgatgtcatggaatttaagttcaatgtctaacttggcactggttatttttaaccaggcctaggaaaaaagtaatgaggatggatcaaatggcaaaaaaagataaagaaaagaaggataagcaagaagaacaaagcccgaccttggaagaaatgcaggagcaaaacctaactttaatcaaaaaattaaccaataaaaacgaagactatgtagttaaactcaaccgccacttgaaagaactaggttgggatgatgaccaggtcaccgaagccttttatgacatgttaccgaatatcgttagagagcaggacaatggggtcttggcccgaaaactatacggaccggtgactgaacaagcggaccggctgacagctggacccaaccgccaaaaccaagccattgaaaagtcccccacctggcaactctatgtggacggggctctcttattgggaggtctcctagccttgattaacggggtcctccaactctttaccaatacggaagcgcagaatcctatggggatcgtcaccctcttggtcaacttcctattagctggggtggccattttggtgatcggcaactacgcaccggtgcccgggcaaaagggtagcttcctcaagtacatcttggcttcagtcttaaccatggtggtttggatgctggccttctccttcatcgctgccctcatcccaccagccatcaacccgcccctctctccagccgctagcatcatcatcggtatcatcgccttggtcgccaaatacttcttcaaacgaagcttcaatgtccaaggtagtttgatctaatgattgaactgataaaagcctatggtcggtatgaccataggctttttagcatggattggagcactgggatcatgtcttataaaactccagctcctaaaaaataatagtatttataaaaataaaaaaacaattcaaaaaatgatatgagacttttcttgcgtattaacggttaacaggactgttaaaataaaggagaagtcgttatgaaaaatatccaaaaaagtttagaattgcagtggttggaaatattgagtgaacgcagcagacccagttattatgtgcagaggcggctgagtcaagcccagctaggttaccagggtgagaaagattttgccaatttagttagtcagtatattcctgaccattggcggctggtccatgacctgacctttaagcgggccggccgccacttgcaaattgactttatcctggtggccccgcacactttatatctatttgaaataaaaaacttccaagcccactacaggttggaaggcagtaagttggttggcgacaatgggactgtttttcggaatattttttaccaggttgaaaatggaatagactacttaaaaacgcttttaggagccagggttccggttgaaggtcagctggtttttatggccgaccaagataaggtggattttggggaccttcatccaggagactacctcaagcgctggcaagttggagattatatcaaccaggcaaaagtcaagcgaccagttgctgggctaaatattccaagcatagcccagttcttgcaagaccaaagcattccttcccatgagggtctagattttttgggtagggaaagactttcagatattcgaaggggtatcatttgtgaagcttgtaaagggagtcaggtcaatcgtcagtcaagaactttcctgaaatgtagccagtgtgggcatagggaaagccagggccgggctatttaccggaccatttgcgattatgcggtcttgaattacaataagcctattcgcttgcaagatttagtccaatttatggaaggtcaggttaattataaaaccctttctaagtatttcagggattttaacggttcctataggctcgggaggcttgctgagctttatccagacaaggaattttcctacccaacaaggtcttgtgattgtgtgcattgccggggaaaagggtgaaggaaggcttgattgtttgaattctcgaataacattagttgtttgagaaaaataatctcggattctcgaataacagctattgtttgagaaaaaagcgggtaaattctcgaataacttaagttgttcgagaaaaaccgcaaaaaattctcgaactagggcccaagctcgagaataacaatcgtaatagataaataaactcgaaaatccattccaaaaggaaaagccgtggttagccacggcttttattatttataatctataccttccgcatccagcaaggctttctttaaggcaaggccaccgcggtagccggtgagcttaccgtcttgggaaaggattcggtggcagggaaccactaccaacaaggggttttgtcctagggcccggcccacagcttgggctgccttgctagatcggcccaatttgtcagccagacccccataggtcaaggtttggccataggggatggcttgcaaggtttgccagacctctttttgaaaggtggttccacgctcatccaagtccaggtcaaattctgaccggtctcttgcaaagtattccaacaattgttttcggtcccggtcgaaaaccgggttggatttgaccagttttgcctctttaaaatagcctttaaaccagggagtctgctgaacttcttctaaactcaaagtatcgacccgggccaggcccacttgtgttttcatcaatagcaattttgtcagcttcgtttcaaagtagctgtagtaaagtatgttctccatgatggcctcctgtttgaggatgctaggcactagcttctaatgagccatgcagctcctagcctaaactgctttttagcattgcaaatgtgaagaaaattattgacccattgattttcctaatctgaatagtcttttggcgtggtgtatgtgaaatgggcaaccgattcttgcaactttcaaagctcaactgtcttcattatttcaaatgtggagtgagtcagtgtcctaagcatcttcctagtctgaatagtcgtcttttggcatggtaaatttgaagtgggtcagtagtctaactaatattgtttttaactttttaagtttgaagtgatttgaacaaacttttcataaattggctcaaatcagccttctaagctccaattaatctgccccaatgtctttcaacttgtccctaaccatagccatgactgccttttggtcctcttcctgttccaagtcaaattggtcgatgttgatcaccagggtggggctttggtcataggatttaaaccagtcgtcgtagtggttgtggaggatcttgtaatagtcgaggaggccggggtctccctccacttgctcatagggccggccccgcttacggatccggtctaagtgcgtttctaaaggaccacgcaagtagattaagaggtcaggtgctttcttaggcatgccggcaatttcttccatcatattggccagcaagtcggtgtaaaggtccatttcagcctggctcatattgccttgcataaaattaatccgggtgaaaagctcatcctcataaatggaccggtccaggacattgtggcggtggcggagggcagccttaatgctgcgaaagcgggtgtttaaaaagaaaatctgtaaggaaaaagcccaacgcaccgggtcatcgtaaaacttttccaataaggggttgtcgtccaccgattcataaaaggcctgggagtttaattcccgtgaaataaagttggtgtaagtactcttgcctgctccaatcattccagctaaaacaatcactgacatagggtctccttccgtaaaatatcatagcagacctatattaccattttccccctatctttaaaagtgaaccagggatgcttggctaggacggtagcactatttcgaacaactaagggagtggagtgagggttcagggatgcttgggcgggaaacttaactagggtaggcaaagttgtgtggaccctagcatgacaatcccagcctgttcggcgcctaacctatactagcaggaagtctaaataccagtgttttggccagttcgaaagataaagcaccttcattatgtaaaaaagtaaattctgttttaagactgctaagcttaagataagtttgtgtaaagccagcccggtctaaccttttagctgctagactcaaattaagagttttaacagaggaaggagatttggtatgaaggcaaaaattattgcccaccggggtttttcgagccggcagcttgaaaacacccaaccagcctttgaagcagccgaccagtttggggtggacgggattgagtgcgacctgcaaatgactaaggacggccatttggtcatctaccatgatgcggatttaaatcgtctggctggtttaccagttagtataggagactgtaatttggaccaaatccagggcttgaccctaaagcaagctggttttacggggacaatcccgactctagtggattatttagactggttgcaaggcaaggacctcctagccaatattgaaattaaaagtcacaagaggccccttaaccaagttgaagagaaagtggtatacctggttcaatcctatggtctatcccaacgagttttaatttccagcttcgacgtggagattttgcgggcggttaaaaacttagatccagacctcaacctagcctacctggttgatagttggaatgaagccatgctgaaccgactagcctctataaagccaggctacatccatatttaccagcaaattttaaaccaagaccgggtcgactttcttcaccggcagggctatctcatcaacacttataccgtcaattcacttcaagcaatcgaccgaatgctagaatttggggtggacgggttgatttcggactatccagaccgggtggctgaccggctagccaaagcctctatttctaaattggtctagtcaagaccaggtggatgtgataaaataatcaagtgattgatagcaatttcaatttaaaattggaggcacattatggaagtaaaagtattcgattcggtaactgaggcatcgcgtgaagcacttgaattgttccagtcagcactcaatgatggggcaaaaacctttggtttagcgaccgggtcaacgccagagaaactttacgaattaatgcgagggtcaagcattgatttttcacaagccacctccatcaacttggatgagtactacggcctagctagtgaccacccgcaaagctataactactacatgcacaagcaactttttgatgccaaaccctttgccaaaaactacctgccagatgggaccaatgaaaatcctcaagaagaaagggaccgctacaaccaaatcattgccgacaaccccatcgacctccagcttttagggatcggggaaaatggccatgttggttttaacgaacctggctcaccctttgattcccatacacgactggtagacttgaccgactcgaccatccaagccaacaaacgcttcttcgattccgaagctgacgtgcccaaacaagcctacagtatgggcttggctgacatcatgagtgcagaccaggtgatcttgatggcctttggggcaaaaaaagcctgggcggtcaatcaaatggttaacggtccggtgactgaagatgtccctgccagcatcttgcaaaaacacgacaatgttattgtgattgtcgaccgggatgcagctcctgaagaaaagtaaaataaggagttagttcttttattagctactgcctgtcaaatgggctagaaaaatctaggttcaagccaagaaaaccggcgaatttctctgaggaaatcgccggctttttagtatgagagccaatttttccaaatgcaaggcatgtcgacctatataaaattctgttatgactagattacatatctgtatttccaaaggttaaatgaatacgctatcatatgaatgcagttattaagcaggagaaaggagcccctatatggccatctttagtcaattattttggatattgttattttccctctttggcgaagttttatcggtcttgattgctcccatctttccagtgccggggagtgttttaggtttgattttgatgtttactgccttgcggaccggcctcttaagccgggaccgggttcaggaggttagcaactggctgaccagtaacatgggcctctttttcatcccaccgggcgtggccattatatcctactttgatctcctggccactatttggtggcaggttttaattgtgattgtggtgactgccacactcatgatggtctttgtgggccggcttgttcaaactattaagcacaagcgcgaccacaaaacctcataattcagtttagcaaggagcttgcaaatgtttgagaccatcatcaactcgcccgtcctgtggattaccatgacggttggcttgtatcttttaggcgattttttaaagcaaaagtggcccaagcccttttttaaccccctctttttcgggactctagccctcattcttattctactgatttttgacattccccttgagacctatgatgcgggtggccaagtggttagcctttttatcacaccggcaacggttgccttggctattaagctggatgagaattttgactacttgaaagaccactatatttctatcctgaccggtattgtcttaggtgtactcttccatacggtcatcatctacatcctgggcctactatttcgttttcaggccgatattgtggcgaccctgattcctaaatccatcaccacagccattgcggtgggggtatccgcaaatttaggtgggattgtccctctaacagttgccgtggtggtttttaccggtatcttcggagcgacctttggcaaggaaattttaagactagcaggcattacagacccccttgcccagggtgtagccttgggtgctgcttcacatgccatggggacagcccgggcaattgagttaggcgacctgcaaggggccatgtctgccttgaccattgtggtaaccgggattaccgttgttgccttagcaccgctgaccatccccattaccaatttattgttttaaccggctggctgaatagaagtcagggaagttgttggcttttaagcctagtcagctgagttgagcggtgtgggagaaaatagcagaaaatttttggaagcagccactcttgctgggctagggctatcctagggaaaaaggcctgaggattctcaaataacattagttgtttgagaaaaatagcggcggattctcgtataacatccgttgtttgagaaaaaacccgtagaattctcgtataacaagtgttgtttgagaaaatggctgaaaaattctcatataacactagttgtttgagaattttccaaagcctttataataacaagtgttcaaaaaatcaggcaagtagtcacataaaaccatccagactaattggccaagaaactgctactttcaacctacttagaaataaatgaaatttttccaaaataaatatttgacaagtgagatcattaagagtaggatatatagaaagttaaataaacttttcattgataaaaagaagagtagctggtggaatggattacagagaacttcgtttgctgagagaaggagacaggaagccagtgaacatggtctttttgagagaatcatcgaatagtgagatggttccgggtatgcccgttacagcatgagagtatgatggtacttgatgagtttatatgtgcgagcatatattaaataaaggtggtaacgcgagctttcgtcctttggatgggagctcttttttatttctcatttttatgactcattaataccaggaagtcaggcaattaaactaaaaatggaggaattatcatgagtaaaaaagactatcaaaatctagaaaccttatgtgtccaagcaggttacgatcccaaaagtggcgagcccagaattgcaccgattgttcagtctacaacctttaagtatgataagacccaaacagttgctgatttgtttgacctaaaagagtctggcttcttctatacccggctagggaacccaaccattgacgcccttgagcaaagagtcgctgcccttgatggaggagcagctgctgtggccacttcatcaggccagtctgctagcttaaatgctgttttaaacattacaaatgctggcgataatattgtcgtcttaaataatatctatggcggaacttataacctctttggcactacccttaaaaattgggggattgaagcaagatttgttccctctaatgatctcgaagcggccgaaagtcaaattgatgataagaccacattaatctatggtgaagtcttggccaacccctcaaccgctatcctggatattgaaaaatatgccgaccttgcccactcccacaacatccccctcgtcctggacaataccctgacaacgccagccctagttaagccaattgattatggttgtgatgtggttgtttactcttccaccaagtacttggacggccacgcaactgcaatgggtggcttggtggttgattccgggaactttgattggaccaagggcgattacccgcaattgacccaaccggatgaaagctaccacggcctgatctttaccgagaactttggggaggctgcctatgccgctagaattagaacggtttgcttgagagatttggggaatatagcagcacctttcaatgcctttctaaccttaagagggatcgaaaccttagcccttagactggagcgacattccgaaaatgcccttaaagtcgcaaaattcttgcaagaccatgaaaaagttgaattcgtcaactatccattcctagaaacgaataaagactatgacttagcccagaaatacttaaaagctggcagtggcgtgatttcctttggtgttaaagggactcgtgaggatgcagcgaaatttattgaagccttagacttggtttctctagtggtcaatgttgcggatgtccggtcctacgccctccacccagcttcttccacccaccggcaactctccgacgaagaattagaggagtctggtatcacgcctaacttaattagactgtctgttggtatcgaaaatgtagatgatattattgccgatatcgaccaagccttaaaagcttaaagtagggatccaatgcccttgatattaccagaaggtctgatgagcgaaagtcttttagaagaagaagcgatcgaaagacttgattcgaccaagattcggcagctagctgtcagacccttaaaagtagcaatcgttaacttaatgcccaataaagaagagacagagcggcaattcttaaaagtcctgtccgatccagtcctgccagtccagatcgacctggtccgggtggcaagccataaggccaaaaatacctcccaacaacacctggaacatttttataaaagcttggctgaaataaaaaatgccaagtacgatgggatgttgttcaccggtgccccccttgagcttttagactatgaagagatcgattattggtcagaactcaaagaattgttggactttgccaaagaaaatgtctattcaaccttgtttatttgctggtctgcccaagctgccctatatcattattacggcatcaagaattcgattgtcgaccagaaaatttttggcatctacgattatgaaaaaagagaagacagtaaattggttgaaggcttagaccaggttttctcagccccgcattcaagatggtcttgtgttgatgaaggtgaagtcgccagccatccggaattaaagattctagcttccaggcctgacaccggggtgagcattgtcaccaaccaagatagccggcaggtattttcctttggccactgggaatataatatagataccctccataaggaatatgaaagggatcttgcagaaaataaagatatccagcttcccaaaaattattaccttggtgatggtagccagcaaaagattagagatgattggaaggagtcgggcagcttattcttttcaaactggcttcacgatattatttatcaaggcaccccttatgacttagaaaacatcacggcccatatagaatctgaatctgccaatagccagtcctatgccagtcaatttgccaaagaaaatgagagaatatgataaaaaacaaccagccaagtgttttgtttaaacagttagctggttgtagttttgggaataatggggaagcaatcgaaacatatgtaattttaaaatttagtgttcagtttgagaaaaatagatgatcattctcgaataacttaagttgttcgagaaaaattaccgggaattctcgaataacaattgttgtttgagaaaacagcaggaaaattctcatataacttaagttgtttgagaaaaaccccggaaaattctcgaataacatttgttattcgagaatacataaagtagtgaatagctacatgtttaacaacatttgtttctttataaaaacttaggtcgccaaataatttagtaaaaaaagaaggttggaagcaggaaattgcagcaattcctgtccactggaaccaggtagggctcctaaacatttagtctcagtctacctttctcttacaacaagcataaccgaacacagcaaagaaaagcccaacttactaatagtaagttgggctttttcatctttcctacaagtcttcaacttcaacttggctgtaaatttcatcgaactgatcagggtcgatgtcaccggttttgcttgacatggcgttgaggacaccacaggtcataccagttttgaggacttcatcagcaggcttgccgtcatctagagccttggcaaagccggcaatggtggaatcgcctgacccaactgggttgacggcttggacggtgggaatggtgacctggtaaaagtggtcatctactttggctacagcaccgtctttacctagggaaacaaccagccagtcaattccatcaaggcttgggtcggtcaaggcagacttgatggactcaggatctgctaggtcaagttcagagccggtaatggccttgacttcttcttcatttggcttgatcaagtagggtttgacagggtggttgacagcagttgtcagggtttggccagaggtgtctagcaagacccgggccccagcatcttggccaatcttaattaggtcattgtagtagtccttggctaagcctttgggcaggctaccagacatggtgatggtggaagcttgctcagctaggtcagcaaatttattcttgaaagcttgactgtcttgggcagaaatttcaggaccagattccaaaatctcggtttgcttgccaccgtcatgcaagatggcaatacaggtccgggtttggccgtcgatattttggtagtcgtgtttcaagttaatttggtctagttcatgccggataaagtccccgaattggcctccgataaaaccggttgtcaccaggtccccgcctaattgttggaggacccgggaaacgttcaggcctttaccaccaggcgttttggaaacttcactgatccggttgactccatcgatagttaggctgtccaaggggtaggagacatcaatggatgggttaagggttacggttaaaatcatgtgaaaaatcctttgcttttagtcgtggtagtagccttggtcccatttttcaaggtattcatcaaattggtgggggtcgaagtcccggctacggccagcttcgatttcagcgatcccatcaattaattctttgttttcttctgtttccttgtagtcagcgtctaagaaggcatcgatcatgtctttcatgatcaaaccaccgacaattttaccaccgaatccgataatgttggcatccaattcttctctagcataaacggcagtcatcaagtcacggactaaggcaacccgggtacctgggatcttgttggcagcgttggtaatgccaacaccagttccgcagatgacaatccctttgtcaaccttgccagctgaaaccaattccccaacttttttaccaaagattgggtagtgggttcgtttaaaaccgtaagttccaacgtcgataacgtcgtgaccttgttctctcaagtggtcagccatttcaattttgatatcggtaacgatgtggtcgcatccaatcgcaattttcattgatgaaaaatcctttctatatctcgttttgcatagctagctgggaaaaatatcctggtcagttcaaggacaagctaaagtgagcattcatcttgccagttcaaggacaagctaaagttaacattcacccaggctagttcgagtactagctggatcatatgagcaatgaagtccgtccccgttcttgaccagttttagcaaatatcctctagcaactagcacaagtcatccaacatgtcgactcggacttggtgacggccaccgtcgtattcagcttggaggaagtggtcggtgatgcttttagccatggcatcggccacaatatcagaccccaaggtgatcatgcgggcattgttgtgttggcgggtcataaaggctgaccgctcatccgaaatttcggcaacgacaacacccttgtgcttgctagcagccataaaagagccagccccaatcttgtcgattgcaatgccgtatgcatcttcatcttcctgcaaggcttgggcaatggccttagatgattcaacaaagtttttggacccttctggactgacatcttggacttcataatcgtaatggctttcgatgtggtctttcaagacatctttcaaacgcaatccatcttggtcggcacctagtataactttcatctaaactctcctttttaaattaaataatctctataaaatcagtgtaatcacttttgacatcttcatctaaatcgtcattggagatgaagtagtcggcttggtccaggttgtagaaacggtagaagtccttgcggttaaacttggacttgtcaccgacaatgtacttgacttctgagttgtttagcatcaactgctgggttaagccctcgctctcactgaaggtgtaaatgccttccggtgtgatgccgttaatcccgataaatgacttttggacaaaaatccggtcgatgaagtcatttgcaatagtccctacaaaacaacccgtaatgtcacgatacctgcccccgattaaaatcaactcgatttggtcatcgtgcttgaaacgattgaaaaggtggtaggagttggtgataattttaacattgctggcagtgaggtaatcatggacgagctcgatggttgtccccgcacccaagaaaactgtctcattatcattgatctctttggcaatcttcttggcaatttctcgcttgtcctcaatgttaatttcaaccttgtccaggtggctcaattctggggtcgaccggttgctagctagcttggccccaccatgaacccggatgatgagcttttgccgctccaattcctgcaagtcccggcgaacagtcatatccgtcacattgagctggtcggtaatttctgaaaccttgacaaacttctggtccttaagctggtccatgatatagtctaggcgttcttccttaatcacgatacaacccccctttgactcttgctcaacaattttctatggtcattttaccctaacatcaaacaaaagtaaacaataataaaatttaaatgtttgtaaataccctggtaagcgattaacaatcccttgataaagtttgaaaaagtttgaaaatttgttgacaatagttggtggcataggtaaaattaaaattgaagttagtcgtttataagtaaatcttatatcatcaaccattgccttgaggactttcactttaagccctttacaatgaagaaaaggagacataccatgccaaaaattagccagaaaaaataccaacacttgaaacaattatcaactgatgaggaatacatctcagccttggccatcgaccaacgtggctctttgaaaaaaatgatccaacaaggtggcggggttgacgacatccaagcagctgttgaagaattcaaggtggctatttcagaagaattaaccccttacgcttcttccatcttactagatcctgagtacggtatccctgcgtcaaaagctagagacgacaaggctggtttgctcctagcctacgaaaaaactggctatgatgcaactgaaccgggacgtttgccagacttgatcgatgacatgtctgtccaagtcattaaagaaaatggtgccaacgctgttaaattcttactctactatgacattgacgaaccagacgaaatcaatgaccaaaaacaccggttcactgaacgaattgggtctgaatgtaaggcagaagacattccgttcttcttagagatcgtgacctatgatagcaagattgacgacgcgaaaggcaaagaatatgccaaattaaaaccacgtaaggtcattgactctatcaaggaattctccaaagaccgctaccacgttgacgttttaaaactagaagtgcctgtcaacatgaactatgtggaaggttacggggatgatccggtttactctaaagaagaggcagcccaatactttagagaccaagccgcagcaaccgacattcctttcatctacttgagtgctggtgtgtcatctgaattgtttaatgaaaccctccgcttcgctaaagaagcaggcactgaattccacggggtcttgtgtggccgtgctacttggaagggtgctattgacgaatacgttaaaggtggcgacaaggctgcccgtgaatggttgcgaactcaaggagcttccaacatccaaaaactaaacgaagtcttgaaagagactgctactccttggaccgacctctacgaagtggagtcttaaaatggctgattttaaagacctttaccgcaaggacttgatcctaacttctcaagcaaacagcaaggaagctgttcttgaagaagtagcggccattctagaagacaaggacttggtcacctcagactttgcttcagaaattgtcaaacgggagtcttcttaccccactggcctagacttgtcagtggtcaaccccgactccccaaatgtggctattccccacacagaagccgactactgcaaaggtcaggctatcgtttatgtcaaattggaccaggaagtcactttccacaacatgatcaagccggaagaagacttggccgtcaagtacttgtttatgattatcaacaaccagggtggagaccaaacgactgtcctctctgacctcatggcctttttcacccaaccaggcaatatcgaccgattagaggaattggaggatgcggaagcagtctaccagttcttgtccggaaacaattagaaagagggatattatggttaaaattttagcagcctgtggtgctgggattaacaccagccaccaaattaagtcagctgtcgaagaagaaatgaaaaaccggggctaccaagtccaagttgacaccacagtcatcaaagacattaccgaagatatcaatgacaaatacgacatctttacccccatttccaaaacagacttttccttcgatattaagattcctgtagttgaagcaggaccaatcttataccgagtgccagctatgtctaaaccggtctttgacgagatcgaatccatcattaaagacatccagtaaagctagcccaaaaccttcgaaggagacactatggattttgccagtatgaatttagagcccctggtgattggggctccagcacttatgtttattttaatcactgtattggcaatgattttaggggcccagttttccaaggccttccaagctggtctcaagctagggattggcctgattggggttggcctggtaatcaatggcctagccaacgcttttggcccggctttgatggactttatgggccaagttggcctggacctttccattatcgatgtgggttgggcgcccatagcggccatcacctggtcgtcggtctacaccttgttctttatcctggttttggtggtggagaacctcatcatgatctattgggacaagacccgaaccttggacgttgatattttcaacttctggcacctggctattattggcctcttggtcatgtattattccaataatattatcttagccactctcttagttatcttcctaggagccctcaagttgattaactcggatttgatgaagcccaccttcaatgacctcttgggaacgccagaatcaaacccaactacgaccacccacatcaactttttactcaaccccttaattttactggtggataaaatcattgacctcatctttcccaaactggaccaatacgactttgatgccgccgccttgaatgacaaggtcggcttttgggggagcaagtttgccattggttcctatctaggcctgtttgttgggatcctaggccggcaaccccttagcgtgaccttcctcttagtctttgtgggggccgcttccttggaactcttctcagtggttgggtcctggttgacctcttccactgaacccttctcccaaggggtaaccaatctcatgtataaacgcctgggaggcaagcaggttttgattgggattgactggcctttcttgtcatctcggtccgaaatgtgggcagtggccaatatcctagcccctatcctcttcatcattgccttagtcttgccaggcaaccatatcctacccatggccggtcttattgtcatcggggtgaccccagccttgctggtggtctgccgggggaaacttttgcggatgattgtcatcggcaccctcaccatccccctcttcctctggtccggaacagccatttcgcctttcttgactgagtcagcccaggccattggggcaatctcccctagctttgcttacgggattgggatttcccactctagcttggaaggcccagtcgaaaaattcctagccatcctactagggcaggcagggaatggctttaacctaggccccatcctcattgccttagcagcctttgccgtctacagccttctcttttactggtatgtccggcaaatgcggaagcggaatgcagactatgaagctagccaggcccaagcagaggaataggatcaatacagttaaggaaaactaagctaaccagaccggcctagctcaaggcagccaagacagttgttaagggcatgtgacgaacaagtcgaagcctagcctggctcagggaagccgggccactggctggtctaagctttgaccagcataaaagtgatcattgtagattaaaaatttttagattgagtgtactttgtaaccgtttaactatataatgataacaggatcaatatttaatctttgccaatcatttataaggaggataaagggtgacagattttcaaatcaaggacaagttttacttagacggagagccatttcaatttctttcgggggccatccattacttccgtatccctcgagctgactggcaccattccctatacaacttaaaagcgttgggcttcaacacagtggaaacctatgtgccttggaatgttcacgaaccagaacccggacactttgacttttcaggcaacttggatgtcaaggcctttattaaagaagctgaagaccttggcctttatgtcatcttaagacccagcccttacatttgtgccgaatgggaatacggtggcttgccaggctggatcatcaatgaagacctccaccctagaagctccgaccctgctttcttagaactggttgacaagttctttgccagactcttcaaagaagtgggcgacctccaatttacccatggtggtccaatcttgatgatgcaaatcgaaaacgaatacgggtcttatggggaagataagaactacttaaaaggtgtttacgatagtatgaaggctcacggggctgacgttcccctctgtacctcagacggggcctggctggctacccttcgagcaggaactttaacggatattgacgaagacatcctgattaccggcaacttcgggtccaaagccaaagagaactttggcaacttgaaagacttccacgacaagattggtaaagaatggccccttatggtcatggaattctggtgcggttggtttaaccgctggggtgaacccattgtcacccgggaaacagatgaattggtggaagccttaagagaggccatccaattgggcagtgtcaacctctacatgttccaaggtgggactaactttggctttatgaatggctgttctgcccgagggactcatgacctccaccagatcacttcttacgactacggtgctcccttagacgaacaaggcaatccaactgaaaaatactatgccatccaaaaaatgatcaaggaagaattccctgatatcgaccaggctgaaccccttgtcaaagagtccactgcacaagaaaatgtccagttggaagctaaggtcaacctggtagatagcctagaccaggtggcggaccgagtcgatagcttgtacacccggtccatggatgaattaggtcagcactatggctacatcctttaccaaactgactttgtcaaagatctggacgaagaagagcggctccgagttatcgatggccgagaccgggcccatgtcttcttaaatgaccgtcacttggctacccaataccaagaagaaattggcgaagacatcaccactggtcccttggaagagtctaacaagttggatgtcttggttgaaaatatgggtcgggtcaactacggccacaagcttttagccgacacccaggaaaaagggatccggcaaggggttacctcagacctccacttcttgacaaactggcgccagtacttgatcgactttgaccgggtcgaccaaattgactacagcttagaaaaagacttcaaagaaggcctgccaagtttctataaatttaaggtgacttttgatgacttagaagatacctatattgacttgtctgacttcggcaaggggattgtcctagtcaatggtcataacctaggtcggttctgggaccttggcccaaccttgtccctttacctccctaaagccttcctcaaagaaggggacaatgaggtcactattttcgaaacggaagggaaatatgcaccaagcctttcctttaaagctaaccatgtgtataaaaaaatggaagaggactagcccaagggttattcccaaaaataaggaggaagaatatgataatcggttcaagaatagatggccgtctcatccacggccaggtagccaacttatgggggtctaagctccagctcgaccgttttatcgtcattgacgacaaggtgtctgaaagcgacgtggagaagtctggtttaagacttgccactcctgcttctatgcgcctgtctgttttgccgattgaccgggcagctaagcagctaaaggaagaccgctacaagtcacaacgggtcatgctagtggcgaagaacccgcaagtctaccttgccttggtggataagggagttgccattgacaaaattaatgtggggaacatgtcccaaactgaccaaactcggtccatcaccaactccattaacgtaacggacgaagacgttgaagtttttaaagagttgcggaacaaaggcatccagctcaccgcccaaatggtgcccaacgacaacgctaaagacttcatgaaattactcaaagaagaaagctaattaaggaggaagacaaatggatatagcattttggcagatacttttaattaccctgtattctggtttccagatttgggatgagttgcacccggtcacttcgatcgggtcacccctctttgccggattttttaccggcttggtcatgggggatatgacaacaggtctcttaatcggggcagggatgcagttgacaatcttaggtgtagggactttcgggggtgcctctcggattgacgcaaactccggtaccatcgtcgcaaccgtcttttccatcgggatcggtatggatccacaacaggctatgtcaaccttggctgttccagtagctagcctcttggtccaactcgacgtcttggctcgttttgccaacaccttcttccaacaccgaattgacacagcgattgaaaaccacgactacaaatccattgaacgcaactacttagcaggtctactaccatggtcactatctcgtatgattccaatctttattgtcctaactatcggaagtggtgtcatcacccaagctgttgaattcctaaacaatgaactcggttggttagcagaagggttaaccttagctggtgcggtactccctgcagttggttttgcaatcttgcttcgttacctaccagtcaaaaaacacctcccatacttaattttaggttttacaatcactgctatcttctctgagctattcaccgatgtatcccttattgggaacgaagttattggcctatctgaagaattcgcagctaacttcaacgaattgccacttcttgccatcttcttcatcggcctagctattacctacatctactacaaaaactctacttcaaaagctagcccagcaggtccaagtgacggtggttctagcccagaccaagaaagtttagaggcttctgacaatgcggagggagagattttagatgacgaactctaatgaaaacaaaacaaactacaaattaaccgataaagactttagacagattaacttgcggtctctatttggcttccaaataggttggaactatgagcggatgcaagggtccggctacctttaccacatattgccccaactccgtaaaatgtatggggacaataccgatgaactaaaagaagctatgagaacccacaaccaattcttcaacacttcgccattctttaataccgtgattaccggtatcgacttgtccattgaggaaaaagaagggattgaagccgttgaatctgctgccggtgttaaggctggtttgatgggatcttttgccgcagttggggactccctcttcggtgctttggtgccagccatcttcggtgctatcggagccaaccttggggccaatggaaacccattagggatcttactttggatcattgctggaattgttatctgtgtgttcagatggagccaattaaaatatgcttaccggtcagggactaaactggtcagtgatttgcaaggccaattgtcagcctttacagatgctgctaccctacttggggttttcatggttggagccttggttgcaaccatgatcgatgtcaacatcggtatcagccctgagatagcgggtgttacagttgatgtccaaaatatctttgacatgattatgcccaaagcagttcctgcccttatcgtcggttttgtctactggttactaggacgggagaatatgacctcgaccaaggctatctttatagtccttattgtgtcagttatcctatctgctttaggtatcctcgtatagaacaattcttgtaaggaaggacggaaaaagtgaaacacttaattttagcaagtcacggcgacttatcacaagccatcaagaaaagtgccgaaatgattatgggcccacaagaaaacattacagctattagcttggaaccccaagaaagccaggaagacttcaaggccaagtttgaagaagccaagtctggcttggaagattttgtcgtcttcactgacctatctggtgggacccctaacaatgtcgtagcccgctacctcttagaaggggctgacttcccagtttatgctggcatgaacctgcctatggtcattgcctttgtcaacgctgaaatgttggaagaaggggacgtggactacagcgaaaaagccaaagaaaacatcctcaaaattaacgatatgttaggtaaataacttgagctttgggcctggggtcccccaggcccagcttaagtttgtgccccagttcattgcttaacttgtccaagtcattgtatgaaggagattgacatgtttaacaaaactgaccaagaattaaaagatttaggtgctgatatcaccacccgtgaaatcaagcagcagcctgctttatgggaagaagttatccaagactttaagacaaacggcgagtattatgccaatttcttgtccactattaaagaccgtcacgaccacacccgggttattttcaccggggcagggacctctgcctttgtcggcgaaagcatcaaagagtacttgaacaaggtagaaggagaaggcaaactttcctttgaagccattgccactaccgacttggttgccaccccggaatactacctaaaagaagatgtgccaaccgtcttggtctcctttgcccggtctgggaactcaccagagagtgtggcagcagtcaatgtagcagacaaaattgttaaggacctctaccacatcaccatcacttgttccaaagaaggaaaattggcccaagctgctgaaaaatcagacgacaacctcttgattttacagccagagctttccaatgaccaaggctttgctatgactgggtcttacacctgtatggccctatctgccctcttcttatttgacccaactgacctcagccaaaaaattgactgggctcggcaaattgtcaaattaggtgggcaagttatcgatcgggaagatgaaattgctgacctggttgctggtgacttcaaccgggtggtctacctgggcggggcgaacttctttggtctagccaaagaaagccagttgaagatcttagagctcacagctggtcaaatcgcaacccaatatgaaaccccactaggcttccgtcacgggccaaaatcctttgtcaatgaagagactattgtcatcctatttgctatcaatgatgcttacacccgccaatacgaagaagacatcatgaatgaagtctaccacgacaaaattgccaaccaggtcctctcagtctcaaccaaaaaattggaccacgatgccaagcaatttgtcttagacagtgaccttgaagtgccggatgcttacttggtcctcccatacgtcatcttgggtcagaccgtttccttgcataccgctgtcaaggtcggcaacaaaccagacaccccatccccaaccggaactgtcaaccgggttgtccaaggggttgtcatttacgactacgacaaataagtctacttgctaaataataagagaaagcctagccaaagctgcgagtcagcttggctaggcttttttgttttgaggagggaccgtgcttggtatcgaagatgaaactggagaattgagtggctgtaaggtggtatggatttgaaactggacaataaatcagaatagggaagttttgaagttgaaactggacaataaataaaaataaggaagttttgaagctgaaactggacaataaatccaaataaggaagttttgaagctgaaactggacaataaatccaaataaggaagttttgaagttaaaactggacaataaatcaaaatagtgaagttttgaaaattaaaaaacgacaattgaatagtcatcaggtactttcgagtcaagtcttaaactccgtgtaggtcaagactcggattgtgaactgtgccgtaagaaggtgactttctaaacttctataattgcgtagcgattgtagaattgtaaagctaagttcataaggcgaccaatcgctcatcaataaacgagttatgaagcaataaggcgttcggtcgctgcttgataaaagagttatggagctgaaaagttgcaagcctcaataaggtagaaggctctgggagaaaaaagaggcgggcaacatatattgtgaaagaagtatcaatagatacaaatacacgaaaccttaagcaaatctcaagctcttattgacttttaaacaaggtgaaattaaaatgaaagtgaatggcatcgtttacattgctagaagtttggtatagagaagaataaatgtgaaatgaatatcaatatttactacttccaccttcaccttgtagctcttttacatataccaataagatcgtgaagcaagtagaaaatatgatgaagacctggcttttagccatgctaataaggagatggaaggggggttcaggttaaatcttgtctgaggttaggtttgccagcctagccacgaagccgaaatggaggaaagaaaatgagtactattattgaatttgccaacactatcttccagcccttgattgacttaggtgcacctgccatgatgtttatcttgctgaccattatggcccttttaatggggattaagttttccaaggccttggaaggtggtttgaagttagcagttgccttggttgggattggtttggttatcgatattttaaccggaagttttgccccagccttgcaagattttgtggcgtccactgggatttacctccccattattgacgtgggctgggcccctttggctactatcacttgggggtcagcttacaccctcttcttcttgatggtcttggtaattgttaacttagtcttactctacttaaacaaaacggacaccctggatgtggacatttttaacttttggcacttatccattattggccttttggtcatgtattattctgacaacctgctcatcgctaccctcctggtcattttcttaggtgttttgaaattcttcaattcagacttgatgaagccgacctttaacgacctcttggacatgcctgattctaacccgaccaccactacccaccttaatttcatgctcaacccccttatcatgctggtggataccgtcatcgaaaaactattccctttcatcgacaagtatgactttgatgcggctgaattgaacagtaaaattggcttttggggcagtaagtttgccatcggtgcttatttgggtgtttttgttggaattctaggccagcaagatgtagttgatattttccaactggcctttatcggagccgcttccttggaactcttctcaattgttgggacctggtttatcgatgctatggagccactctcacaagggattacagactttatgaataaacgcttgggaggacgccaagttttgattgggatcgactggcccttcctagcagcccggccggaaatgagggctgccgctaacgttatagcacctattatgcttctcttggccttgatcttaccgggcaaccaaatcctgccccttggtgggattatcgccattggtttgaccccagctttgctggtggtttgccggggtaaattgattcggatgatcttgatcgggtctttgatcattcctgtcttcctttggtctgggaccgccattgcccccttcgttaccaatgtggcccaaagcgtaggtgcgacacctcaaggcgttgaaactgggactatgattacccactccaccttggaaggcccggtcgaaaaatttttgggtatcttggtgggacaagcagctgacggctttaacctcatgcctattgtctatgccttgcttgctctagctgtttatagcttacttttcatttggtacgttcgccaaatgaaaaaacgaaatgcagaatacgcagcccaaaaagcagaggaaaaataagctaacttaaggacaaggaatagacataacacaattaaaaggaaaggccaggaccaagcaaggactttattatggtttgtggcctttcttttttaggcaaaatttgcgattttggtgaaaaacttgtttgtgaagtaatgaatatgttgacttttgatcgttaaagtcataaaattaaaaatagataaaaagtaagggattacacgagctggttatttgattaaagaagctccaccagacttattaaggtcaactcagcccttgcttttatcggccacatgaaagtgagtgtggtttgttaggataatgaatatatgtaagcctttccctaagaaaacagggtaaaggtcgagacaaagagaaggaggtttgaagattgttggggtctcaagactgggttgggtcttttaaagccaagaccagccagtttgaaaagaaacagcaaaaaatgaaacatggggagtgtaagtaatgctaggaaaaaacaataagaaagccaaggaaagatggaatgggcgaaaagttgaccacttttcattgaaaaaattgtctgtgggtgtggtctccgtagcggtatcttccagcttgttcttctttaacagccaagaggttgcagcagaagaaggggaaggaagtcaacaagttgaagctgtggccgaccacttgtcggacaaggccaaagacttggaagactcagaccaagctggagacctcataacggaagacccaggccaagtaggagacttttttacagaggatgtcgtagagggccaagctggtgaaggcgactttgagcctggtgaaaaagccgaatggggtcaaacagaaaaagccaaccgcgacaaaaacgaaaacacaaaagcaaacacaggcaaacaagtttccccagaaggtcaagcagaagcaaaaactccagaagaaccggatagcccaataagccaaaaagaacaggaaactaaaccggaccaagaaagtctacaaggctcaactagacaagcaatacctgaaactgaccagaaagaagaatctggagctgactgggaagcaaaagtatctaaagaatcacttgatcatgataacacagggcaactaaaagaagctcaggacaaagatactattgaaaatgtagaagaaagtgattatgaacgtactgaccagcatttaggtggaataaagtccattaaccataatcagaatcaaattgaaattgaatatgaaactggtcaaactgggcgggttgatatttataccgataaaattattcgtttccaggtagagcaagagggaaatgaatttgtcgatactcctgaaccttctcaacctgataaaccagctgaaatcattactaaggatcttgatgatttcgatgtaatcgtaccaacagtaacagaaacagaaaattattatgaaatcgctactgattcactagttttggaacttgataagaaacggggaacagctaagctttataaaaaaggtcaaaaagatcctttatttgaagaagctgagccacttcaattaagtgaagaaggaaccaaacaaacacttaagtcaaatgaaaatacttattattttggtggggggacgcaaaatggtcgtttttcccacaagggtgaacgcattaacatagttaatgaaaataattgggtagatggtggtgtagcttctcccaacccattttattggactactgacggatatggtgttatccgtcacaccttccaaccaggagtatatgattttgaaaagacagattcagaacgagttactactacacaccttgaaaaccggtttgatgctttctatattgtaggagatactcctcaagaaattcttcaacaatattatgaattgactggttatcctatagtgttaccagcttactctctttatgaaggtcatttaaatgcttacaaccgtgattattggatggaagttgaagaaggtactcctggtgctgtttactttgaagaactagatggctggttctttgaacttcaacctgaacaagctagccaatatccaagctgggtattaatcagagaaacattaacaggcgaacctggtgacttgaactatccatttacagcatcagcagtactggatcgttatcagcgaaatgatatgccactaggctggatattggtaaatgatggctatggagctggttacggacaagaagatagcctagaaggcaatatcttaaatcttagaaagtttgctgaagaagctagggataaaggtgttgtaactggtttgtggactgaatctgagttgactccggatgagtcattgcccccattattacagagagatttagcaaatgaagttggcaaagctttagtccgagttttaaaaacagacgtagcttgggtggggcctggatattcatttggattgcacgggacccaacaagctggagatattatggaaaacgcctctggaggtagccgtcgtttcattattagtctagatggttgggcaggtactcaacgaaacgctgctgtttggactggggatcaaaatggcggtgaatggaaatacattcgtttccacataccgacttatattggaactggattatctggtaaccccaatgttacttccgatatggatggtatatttgggggaagaaatccaattgttaacactagagattatcaatggaaaacctttactggcatgcagttaaacatggatggatggggcgataatccgaaaaccccatttacatttgatacaacaactacggatttaaatcggtcatatttaaaacttaaatcacaattaatgccttacacttatagtttaatgcaccatgctcttgagggagaaccgatcgttcgagcaatgtttattgattttccggatgaggaagttaattatactccggcagttaactatcaatttatgtttggtgaaaatttcctagtagctccaatttacgaaaatgtcaaaatggatgaaaacggtaatgatgttcgaaacaatatttatttaccaaaaggggaaaaatggattgactactataccggagaagtatatgacggaggttacttcttacacaattttgatgcacctatttggaaattacctgtctttgtgagagcaggggccattattcctatggctaaaccaagtaataatatcaaagaatatgacccatcatatcgtgcttttgatatttatccttacggtcaaacttccttcactttggttgaagatgacggttattcaatagattatcgacaaggtaaagtagctaaaacagtgattacttcaacacaagaagatgatcatgtttctattgaggtaaacccaactcaaggtgaattcgagggtcaggtcaaagaaaaaatcaatcaatttaacattaatgttacttcacaaccaggctcggttgacctgtttattgatggggagaaagttgagttagaaactgtatctagccaagaagagttcgaaaaagggactaatgttatttattatgatgctgaaccagatttaaatcaatattctactgaaggcggggccttctatggcaagcaattaataaaaaatccagttcttcggattaaaactgatttcgtttcaattaattcttctattaaattagaagttgaaggctttgtttatgacaaacctgtaaatcaagccacaggagatgtgagaggtgacgctccagacttaattgttgaagaagagggaataacaagcgatactattactttgacatggttggatgtcccaggggctcagcgttatgacttattagttgacgatattcttcatgtcaacattaaagagcctatttttacccaaactaatttaagacctgaaacatcctatactttccgagttagagctgtctttgatgaccatgtaactgagtggtccagtccaaaaactgttaaaacagctgaagatgatttttcatgggctattacagtgcaaaatattcaagctgacttcgatagtcagcctggacaagatatagaagccttagttgacggagatcctagtagccatttccactctcattgggataaagattctgttccaggccgaattcaaatggacatgggtaaagtttataccattaatcgtttggcttaccaaccaagaacagatggtggaactaatggcataattactaaaatggatattgcttattcaattgatggttctaactggcacagattagatgaaaatgtcgaatttcaaattagtccggacttaaaatttattgacttggatgaagctatacaagctcgttatttggtccttactattcttgagacagctgacaatgaatttatttcaggtaatgaattctatattttccaagagcctaatagtaaaccattagtagctggggatgtgaccggagacggtaaggttgattctagcgatattatgtctttcaaaaattatgctggcttacgacgaggagacagtgattttgacggatatatagaagtcgcggatctgaatcaaaacggttttatagatgcttatgatatttatctggctacaagacaactttcaagtcaagttagcccaggatcggaagaacctcaagaagtaaatggacatttaaccctagtcagtgataaaaaacaagttaatgctggcgatacatttactctgagtttagtggggcagaatctcaaaggagttcatgccattaatggggtaattccattgagtacaaatcagttgtctgctgatgaaaatataaaaatatctaatgaagttcaaaccatggagaatttttctcgtattcgaactcatgctaatggggaaactgttgcttatattattttggctaactataaaaatagtccttctattgaaggtaatagtgttattgcaagcataacacttaaagctgaagaagacttagatcttgaagagttactcgaaaacttgaatgatcaactctttttccttgttggtaaagatatgaaagttatccaaggactagttgaagaaacatcagagtcagacgaagactacccaactattgaaggagaactctccgttgattcggtctatgacttcctagcacccgtctttgagtggaacattgatgacgaagaagatacagactacccaaccattgaaggagaactctctgttgactcggtctatgacttcctagctccagtctttgagtggaacattgacgacgaagaaagcacagactacccaaccattgaaggagaactctctgttgactcggtctatgacttcctagctccagtctttgagtggaatattgacgacgatgaagacacagactacccaagcattgaaggggaaacttcggtagactcggtctatgacttcttggccccagtctttgagtggaatattgacgacgacgaagatacagactacccaagcatcgaaggggaaacttcggtggactcggtctatgacttcctcgctccagacttcgagtggaacattgactacgatgaagatacagactacccaagcatcgaaggggaaacttcggtagactcggtctatgacttcctagcaccagactttgaatggaatattgactacgaggaagcagccccaaccagtcctagcccagacccagatcatgaccaggatgacgatagtcaagatccagatggtgctagtggccaagctccagaccttgatgacttagagcctaaacctggtgatccagacgacagggaagacccacaagctgactcagatgaccaagaaggccaagttggtcaagatcctagcgacccagtggacagtcaagggactccaaaagctagcgtcaaaccagtcaaatctgacaaaacttccccagtagttccaagccaggacactggctccaaagaagctagccaggtcaaagacaacaaggcccttgactatttgcttaaacaggctaaagctgaaaaagctggaagtcagaaagcggccagccaacaccctcaaactgattctgcaagtcaggctaaagattccaaaggcaaggaagctttaccagacactgccacatcagcttgggctctgggagctcttggtttgtcagcccttcttttaggactgggcattcaaaagttcaaaaaagaagacaaagaagactaggccagtgagttagactcaaagcgtcactaggccaataccatgaagcccatccagttactggtaactggatgggcttttttggttctataatatttagtgttggtgggattgggctaccaacactcttttttatttgcctttaacgagatttggagccgttctgaaatgggatcgaacaataagtttacactttttatatagagaattgacaggtttctctttaagatagtggtattttttagtttaaattagccactttgcgattaaaaatttctgtattgaacaatgtcatagttgattacgatattattttactaattagtataggtatctttaaggaagaacacaatcatcatataaagatcttgtaaacattagttgatttatttacttaaacaaaatattaaatataaacagaatttactttctaaatctataatggaataggagtaattattatacaaaattttgaaaggtaggaaagtattatgttgaaaaatgttgggaaatggttattgatgacttcaagtgtaggtttattattagctggttgtcaaaatgaaggtgaatctcaatcggcagaatcagggcaagaaggcgaagcagaaactacagaaattactttttggcactccatgggtggtagtgttggcgaagccttagataatttagttgaagagtataacgaatctcaagatcaagtccttgtaaacgcacaataccaaggagaatatgacgattcattgactaaaattcgatcttctgcatcaggctccaatcttggtgctgacttagtacaagtttttgaattaggtacaacatttatgaaagattcaggtatgattgttcctgttcaagaatacatagaccaagatgatgaatttaacattgatgacttagagcctaaccttgcagcgtactatactattgatgatcaactttactccatgccatttaactcatctactccattaatgtactataacaaagatatatttgatgaagcgggtgttgaagttccagaatctttagaagaaattggtgctattgctgaagatttggaatcagctggagctcagatgccagctgcagttggtgtttacggttggtacattgaacaatggttctcaaaaatggaagaagatatgtacaacaataatgatggtagggatggtcaggctactgaagttgtatttgacaataatggtggtatgcagaaaattttagacacttggaaagatctaaacgaccaagaagttttaccatcagttgggcgaggcgatgcaggtggcgctgaattttcatcaggtgatgcggcgattactcttcaatcaacagctggtttaagagaaattctagaccaagtgggggatcgtttcgaagtcggtactgcctacttccctaaagttactgaagatgatcaaggtggggtttccatcggtggagcttcattgtggatgattgactctgaagatcaagaaaaaatggacgcaacctgggactttatcaaattcctaacttctccagaggtacaagcacagtggaatgcagatactggatatttccctgtagtaactacagctcacgatgaagaagtctttcaacaaaatattgaagaatttcctcaatttgaaacagctattgatcaattacatgactcatcaccagaagaccaaggtgctttaactggtactagtcaggaaaatagacaaatatacgaaacacaggtagaaagattattaaacggtgaaatttcagtagaagaagctataaatgaaatggctagccaagttaaccaagctctagaagactatgatcctgctactgctgaataagtgtagaatggcacatatttaatttaagatcatcttgtgtcacaaaaggagatggattatatgagtaagaaaggaaatgggcaaacggatggaattatgacgaaagttgagccttggctatatcttgctccgtcaattattattttgagtatatttatgttttggcctttcattcaaactatttatagaagtctttttcaaacaaatagttttggagaaatgacagaatttattggtggaagccactaccaagatttattaacttctcaatcgttttggaatagtgtgactgttacctttatttttgtggttgtagttgttttgatcggaattgtcctaggctttattggggcaattctttgtcaaaaccattttccaggacttcaatttttctcaacctcttacgctactccaatggcaatagcttctgctggtatggctttaatctttcaagttatgttaaatccgtcaatcggttttattaataaggtcttaggtacttcaacaaactatttgacccagcctttaccggccttaattatcattggggtattaacgggatggctgaatagtgggatgaattttctttattttagtgctggtttagctggtattgataattcattatatgaaagtgcgtcaatggatggggctaatggtttacaaaaatttatatatattactcttccttcaatacgtccagtgtttttctttatcattgtgactaacatcattaacgctttccagggttttggacaaattaatattttaacccaaggtggtccaggtcaagcaacgaatgttattgtatatgatatttatcgcaatgcttttgaaaattatcgctatggctatgcatctgcagaatctgtcatcctcttcttactagtgatggtactgacgatatgtatgttcatgatcgaaaggggacgaaagaatggctagaaaattggactttaaaaagatgggtctcctgtttttaaatatagtttattggatcattttgctctttcctctattttatgcaatctttatggcgatgaaatctccgtcagaattgtatgatccggaatctatattcttccctactgatccaacattacagaactttgtgaatgtatttaacgttgctcctattgggcgctatattatgaactcgttgattgtatcaatttttatcacaatttttcaacttctgacttcgaccttagcggcctatgcgtttcgttttctaaattttaaaggatctaatgctatttatagtttaatcttagcgactatgatgattcctggcgaagcagtcattatatcacaatttttaatggtaagtggctggggatggactgatactctttatgtattaattattccgtttatggtctctgcttttaacattttcctatgtcgtcaagcattagataattttccgtatgaagtttatgaagcttctaaaatggatgggtgttcccactttaggtttgtttttaccattatgatcccactcattcgacctacattaggggctatggctgttcagtcattcctacttggctggaatatgtatatgtggcccttgctagttaccaatgttgatgaagctcgaacagttcaaatcggtttaagcatgttgaatagtattgattcacagtctcttgtactaatggttgcaggagtagtcatttgtatgattcctagcttactcatctttgtatttggacaacgtaacatgattcgaggattaatgtcaggagcagtgaaaggataatagtatggcaaacttagaactaaaaaatgttgataaggtttatgaggatggctttcaagccgtaaaaaatattaacataaaaagtgacgaaaaagaatttatagttctcgttggtccgtctggtagtgggaagtcaacaactttacgtttaattgctggtttggaagaagtaagttcaggtgacttatttattgatggagaaaaaatcaccggactagatcctaagaatagaaatatagctatggtttttcaatcgtatgccctataccctcacatgactgtcagaaaaaatatgacctttgcattgaaactaagtggaatttcaaaaagcgaacgaaataaaatagctgatcaggtagccgaagctttagatatttctagcttaatggataaaaagccagatgccttatctggtggtcaacgtcaacgagttgctttgggaagagctatggtgagaaatcctaaagtttttctattagatgagccattgtcaaatttagatgctaaattaagggtttcaacacgatctaaaatttctaacctataccaaatgcttgatgctacttttgtttatgtgacgcatgaccaaactgaagcaatgaccatgggaactagggtagctgttatgaaccaaggacaaatagaacaattcgatacaccagttaatctttattacaatccacgtaatcgctttgtagcagaatttataggttctccccaaatgaatatgctagaaggtaagattatagacgatcagaataaacgaatgataaaaatagctgggcaaaaaaaaccactaccaaattctattgcacaacgtttaaactatgataaaaaagacggcactgtattagttggtatccgcccagaagactttgactatcatcaagacgacaaagcccaactaactttggaagttataccaaagcgtgtggagcaagtagggtcagatacaatgatatatttcttccagaaagataatgaaatggaatattgtgctcgtttatctcctgcacgtccaattgctttgaataaagcaattaaagttgatgtagagctagaacgcttgtacctttttgatacagaaaccaataatactctactcagtcctgtggaattggaggaaatttaagattggatattattgctcatcggggatttagttccttgtatcccgaaaatactgccttagcttttaaaaaagctgttgaatatcccatttggggaatagagtgcgatgtccatatgactaaagatggtcaagttgttatctgtcatgatgaacgaattgaccgaacctcaaatggtaaaggattaattaaagatttaagtctatcccaactgcgagaatataatttctatgggaaatttccagaacaagctagcgaggatactttaatctggaccctagaggaattttttgagtggtttgcagaagaagcaataaaagtaaatatagagttaaaaacaaatatatttccttatccaggaatagtagatgccgtagcggattctattgagaagtatgatatgttagatagggttataatttcatcatttaaccatgaatcaattttagatataaaggcaagattgcccgaaatacagacagcttttttaacaatgagtttaatggtagaacctcatcaatatttgttaaaccatagtgttgatgcttatcatccattgtatttttcagtaaatgaaagaatcgtcaagggctgtcatagtcattcgatcaaggttcatccttacacaatagatgatctagagaatgtgcaaaaaatgtacgatcttggtgtggatgctgtgattactaatcaagtagataaagtatataattatttgaatcgacaattgaaagtcatacaagaagcttaaccagggtaaataggtaacttatagtaaataaatcattttataataaaaatatattcgtaagatcaatagtataatgctaatggtactgaagtctttttattgctaaattttgattttatgttatttgacaatgatggacattgatatcatttaaagacaagaagggctagctttttaaagttggccctttatattagatgaatttataaaaagattattgtagatttcaagtgtaagttagctacctcgagatcaaaatttacaaatgattacttagtatttacattaattaaataagtgaagcgtagtattactattaaatacttactaactaaaaggagaatggaaatgggcaagaaaaaaattattgtagatcttttttatactctacaatggtattaggcattgtttctttgagtaattccaacaaggtatcagctaatacatattccgaagatgtaaatgatatagttaatattgaagatactactaaagtgactagtagcgaggaattagttaataaaaatgaagctgaactagctactaatttttctgatggatatccagctagtcaagaaaaaaaagacgagaataacgacaaagttgctaatgctttagaagtgggtaacgagactgttgatgaagaagatataaataaagacaacgatttggacttgactgaagaatctattggattagaggatagtgctttagaaagatctacttttgaaactagcagtcaggttaatactaagcccagagttcgcgaagctagtggccctctttctaaagaggacattagaagtttaacggttgctgatctagaagaaaaatcttcgaatgccgaagaaaatagcgattcgaatggtacagatgattcagaatataatgcagattctagcgataaggaaagtaaccaacaagtaaatacagatatctatatttcagaaattcttcctgataatattggtaccgatcgatttgaattttttgaagttacaaatacaactaaagagccaataactttaaatgataaatataatttttcttacggctacaataatacaaacgatacaagtgaagatgtacctttatcttatgaggatcaagtggtcatttatcctcaaaatccagctgttttttggttaagttaccagacggatagtcttaattcctttgatcataatgaggaggactttcgtgctcattttggaattgatcggggaattccactataccgaattgtaggccaaaaaggtatggctaacaatggagatcgaagcattagagtttggaaggatgggaacttaatcaactggtcttattatgaagctgatgacgtgtctccgggtagctcagtcaaatatgaagtcccagatgatcctaaacaacgatcaatgcagttgtttcaaagcaatgctgccccatcaccaggatggattgaagattataataaacagtacagagcgtaccctaaactaattgtatctgaaatcatgcctgatacaactggtaaagatgaatttgaatattttgaagtcactaacattactaacgaagctatctttttaaacagtggttatagttttgcatatgggtataataataatgaagatacaagttcggatgttccattacttgttatttcttcagaaaatataatttttgagccaaaagaatctgttgttttttggttaagttatactaatgatgacttagattctttctctcgtactgaagatgagtttaggcaagaatttaatgtacctagtacaactaaaatttatcgtgttattggtcaaccgggaatggcaaacaatggaaatcggagtataagaatttataaagatggtgagttggataattggtctttttatgaagatgaatttgtagctcctaatgaatcagtgtcttatcgtttacctagcgacccatcaaatagaagtatggatatttatgaggttaaagttgagtatggcaacccagggaaagtggaatttgatcagctcattcctaataaaaaggaagagcaaaaggttgatatccctcgtcctttaaccgctcctccattagtagttacagaattacttgtcgatactgaaaatacaagtggttcagatgcttacgagtttattgaaatagccaatttttcaactcaacctatagatttctcacatttcattatcaattatttatacccagaagattatgatacaaacacgaatactattctgtggccttctcgcccttcagatattactattcagccaggtcaaactctaactttttggattaaaaatggaaataataaccacttgactattgatgatttcaatcaaaaatttaaaactaatatggtctatggggagaactttgcagaaatttacacaggaggtatggctaacggaagcgcccgtgggattcaaatccaaaccaatactggccatgtgattaatcgtgcttattataatatggcaggaaaggaagttgaagcagaacagtcgtttaaatatcaatcgaatgattcggatcctacacttcaaaagaaaattgacaattctactcctacgcccggacagttagaggactaccagattccagacaatttctatgaatttaataacgaaataaccactccaagtattcaaaatttgtctccagatatattttatagagacaagcctttagatctgatattttacgtacttgacgagaatttagtaacaaccgttgtcctagagatacaaacttcagctgatgacgaaacaactacttatttcctagaaatagaccaagagggaatagctacacaccgcatcgaaccagctgatttaactggaaaagattggattaattacagaataacggcttataatattcaaggacaaagcactgaacatacttctcgtactgaattagctaatccacaagattcttcaataagttttaaccttaatgacgggtcgtgggtttctgatttaacttcagtgattgctactggagatacattagaagatattgttagactagagattaatggtcagagcgtttcaacagctccatctttagcggataacccagtttttgcttttgaagcgactagtaccgatacttattttttgaatggtgtggtagtagacggggatacattgtatattttcgatgaagggacatattcagatattgaaacaatatcagttgatattccacaagattataaaaaggaaaacaatactttaacagtcagtattgtcgctggaactaaagccaaaactggtattgatccagatgagaataatgatgacttcgaagttaagggtatgcgactagtcttgccagatggtagaacactgtctccaaaaggatataacgatcctcaagaatacattaggatgggggatagtgacggaaaatatgactatattaatttagtgtttgaaataccatttgatgcctttattgggaatcgatacttatttaatccgaacaattatcaagatggcccacatactattactgctaccaatcaagctggtgagaaagaaacaattactattatggttgataaaacgggcccagttattgagactaacattgcacctggctcttacttgaaaggtgaaataaaactgagtgctaaagtttatgatactggaatcggtttgaaagattatgctctatacttagatgggcaggaaattaataataatcataagacttcatccgtaattttgccagctggtgagcatatttttcaagtagtagctgtcgataaattaggaaatcaaacaaaacatgaaattagcttcattactcctgaagagaatccttctgccagtaattttctgcctgggaatggtgaaattgtgactagtaactcattgaatttacaagccacagttgaggatcctacaaatgacatattaaaagttatttttaagttgggtgagaagattgacgttgactctccgagagttcaacttaatattggcacagtaaacgatgccttagaagttgagcgtggagaagcgaacaagttgacgtcggaagaaattgaaagcttatcagaattggatggagacactgttgatgtagagtcagtagaagctttcccatatcaaatttttgaaataaatgtagggcaaagggagccaggatccatggttcgctttagttggtcaggcgaagctgatggtcgagctcaagtccggttatatgtctttaaccatgaagaaaatacttggtatgagttagatagacatttgaccgggaacttagaaaagggtcagcgagaacaatttgagttgactggcatggtagaagttgatcaatttacagatgatacccataacatcaaatttttagttcagcattctttaggttatgccggacctaactatagttatcgtacaagtgaaatcatacctaatcatcctgatgatgaaccacgttcagagtatgattttacatttgcttggcaagctgatacacaatactacaatgaacaatatttccaacaccaagcttcaattcatgattttattattgaccaacgggaaaatatgaatattcaatatgttgttcactctggggatatagtagacaattatgatcaactctaccagtggttgaatgcaaatagggaatataaaagattagatgatgctggcataccatacggtgtattggcaggtaatcatgatgtaggtaataaaattaatgacttcaccttatatagtaaattctttggtgaagatagatttttggataatccatggtatatggagagtcataaagataatcgtggacactatgatctaatttcagctggtgggattgactttatcattgttcacatgagttgggaacctggtaaggaagaaatcgactggatgaataaggtacttgctgaacacccagaacgagttgctattttaaataaccatgagtttttacaaacaactggaggtttgggtatttatccacaaagaattatggatgaagttattgcaaaaaaccctaatgtaagaatggtaatgtctggtcactaccacgatgcatatacgagaatagattattttgatgataatggggatgggataccagatcgtactgtgacttctatgttatttgactatcaagggcttcctgaaggaggactgggattcctgagattacttcactttgataatgtaaatgaagtggtcaaagtacgtacctattcagaatctttgcgaacatacaactccgatgatccttcattgcttggcgaaacggaagaaacacgctatatctatcaagaatttgacttgccttatgcccaacttggtattgttccagaaggacgaatcttatcaacagataaaattaacgttgaagttttatcaaataaaccaatttcaagtcaaagtggtattgaaccatctagcaatgtctctgctgaaattgaaggtgcagaaaccgggacttatgattggtttatacacttaagtgatgcttatggaggagaatattactcaccaatccatcgtgttcactaccgtaaagttgaagagtcaaaacaagatattgtttctaaagttccagtagaatacgaagtgattgttaatcagacttctgaactctttcaaggtgaaagtcgtgtagttcaaaaaggatcttttggagaaaaaacgattatcactagagggggccaagttatatttgatgagataactaaagaacctattaattgcattgttgaaataggtacaagaagtttagaaaacccatatgaattagatgtttataccttgtattactacggtcagaagactagaggtacaagcggagcatttactgtaaaagctaaaagtttagatgaggcaaaaagatattttcgtaatttggttgttgagaatgacttaggagatttggattggtcatatgattcagaaagaaaaattttttatgctaaagaaaaagatatgaaagaattaccaacttttgaaggcgagacttcagatgactcggtttatgacttcttagccccagtcttcgagtggaatattgacgacgaggaagacacagaccacccaagcattgaaggggaaacatccgtggactcggtctatgacttcctagctccggactttaaatggaatatcgattacgagggagacacagactacccaaccatcgaaggggaaacatcggtagactcggtctatgacttcctagcaccagacttcgagtggaacattgatgacgaggaagacaaagactacccaactattgaaggggaaacatcggtagactcggtctatgacttcctagcaccagactttgaatggaatattgactacgaggaagcagccccaaccagtcctagccctgacccagatcatgaccaggatgacgatagtcaagatccagatgatggtagtggccaagctccagaccttgatgacttagtacctaaacctggtgatccaaacgacagggaagacccacaagctgacttaaatgatccgaaaggccgggacgatcaagatgctagcgacccagtggacagtcaagagactccaaaagctagcgtcaaaccagtcaaatctgacaaaacttccccattagttccaagcaaggacactggctccaaagaagctagccaggccaaagacaacaaggcccttgactacttgcttaaacaggctaaaggcgaaaaagctacaagccagaaagctgcaagccaaaaccctcaaaatgattcagcaagccagggcaaagatcccaaagacaaggaaactttaccagacactgccacatcagcctgggctctaggagctcttggattgtcagcccttctttcaggactgggcattcataagttcaaaaaagaagacaaagaaggctaggccagtgagttcatcttaagacgttaagcacaatagactaataggattaagcccattcagttactttttcttgtaattgaatgggtttatttgaatatattaattaatagtaggtaattttgtaaaaacatttattataagctactttatttaactgataggtttatgtgaacaataaaacaaaataacaaacaagtaaatgtttagaatatatttaaatcttgtaaaaaaatgttgacatatttttggaaacgttttattattggagtgaaaagttgaacaaaacacataaaagaaaggagtttttaaagtctaatagagataaacaaaaagtgtaaaagctatttaaacatgaaagtggggaagaaaatggagaaaatagtgcaaactatcgaaaaagctagacccttttttgaaaaagtaagtaaaaacaaatatttacgatcgctgatgaatggttttatcgcattaatgcctgtcgttatgttttcaagtatttttatgctgatagcgtttgttcccaatatttttggtttttattggagcgaagatgcaacagagctattgctaacaccatataattatactatgggatttatgggattagttatttctgggacaatagctaagtctctgaccgattcttttaataaagatcttccgctggatgaacaaattgcaccaatgtcaacgattgtagcagctatattagggatgttgtttttatctacggatctcacagaagcagggataacgactgattacttaggaacttctggtattattgcggcgtttgtgtcagcggttattgtcgtaaatacttattattacttcattaagaaaaatataacaattaatttgccaaatgaagtaccaggcaatgttgcttcggcctttgaagatataatgcctttttcagtcagtattatcctaatttatattgtggatcttgttactcgctattttgtagggaataattttgctcaatttgttattgaattatttcaaccattgtttcaagttgcagattcctatgtaggattaataataattgcttttgcagtctcttttttctggttcattggtatacatgggccatcagttgttttgccagcagtaacagctattatgtatcaaaacttagaattaaaccaagagctgatacaagctggggagcaagcttttcatacactaactcctatgacaaattcatttgttattacaatgggtggtaccggtgctacatttgttgtcccatttatttttatgtggctagctagatctaaacgaaataaagcagttggaaaagcagcatttattccaacatcgtttggggttaatgaaccaattttatttgggggaccattaattttaaatcctatattctttgtcccttttgttcttgccccagtgacaaatgttattctatataaattattcgtagatttattctctatgaatgctttgtctttatacttaccgtggacaactccaggaccattaggtttagtcatgagtaccggctttgctccgctatcatttattttagcaatactgattttagcagtagattttgctatttactatccgttctttaaagtatacgataaacagatactagaagaagaaatggaaaatgaagaaggctctgtggatgaagaagaaatagaagaaacagatatgagtgagctgactgataatatcgatgataaagaggtgaaagttttagtcttatgtgctggtggtggcacaagcagacaattggcaaattccctaaatgctggtgctgaagaatttgatctttccctaactgctgtcggagaacaatacggtagccataatgatatgttaccaaattttgatttagttgtattggccccacaagtagcatcgaactatagtgatattaaaccttcaacagataaattaaatataaaattagctaaaacaggtggccaggaatatatatccttaactcaggatcctgaaaaatcacttaagtttgtttataatttgttaaacgaagagtagcaaaaaataatagtaaggagaattactaatgaccaataagtcgatgtttacagacgaattcctattcggtagtgcttcagctgcatatcattttgaaggtgcttttgataaagatggaaagggcccttcagtatcagatgttataccccattctccaatggatggtcgaactgaaagacctgaagaagggaatttaaaacacagagctgtagaattttacgatcgttataaagatgatgttgcattatttggagaactaggtttaagatcttttagaacatctattgcttggacaagaatttatcctaagggtatagaagaagaaccaaatgaaaagggtttacaattttatgatgacttgtttgatgaattattatcacatggaattgagccgataataactattactcacacaggggaaatgcctttgtatttagcagataattataatggctttgctaataaggaaacaattgaattttacctaaaatatgttaaaacaattgtggaacgctaccaagacaaggttaagtattggctgacttttaatgaagtaaatatttctggaatgcagccgttttttcaagcaggtgtgtctcaagatcctgaaactattgatgattcagtaattgctcaaattcatcacaatatgtttgtagcaaattctagagcaatagaaataattaaaaatatcaattctgatttgatggttggatgcacaacaaccattggacctgtgtatgcaatgacgccaaagcctgaggatggattagcccagtattttgatactagggaaatgtttttccacacagatgtacacgtctttggtaaatatcctaaatggaaaattaagcaattggaagatagaggaattaaaatagatgtaactgacgaagaattgtccataataaataataatacagttgattttgttgcctacagttactatcaaagtggtgtatccgaatctggaagtgaagagaacgatggcgatgttaacgttattagtaagaaaaaaaatcctgaattagaagttaatgaatggaattgggtcatcgatcctgtcggtttgagaattattcttaatatggtatgggatagatatgaacttcctcaatttattgtagaaaatggtgtttcaaaactagaagaactagagcgtgacgaaaatggagaattgactgtaaaagacaactatcgtattgaaggccttcgagattatttaatccaattaaatgaagccattgctgatggtgtggaagtgattggttatactaattgggcagttatggattttgtaagtggctcaaccggtacaatgaaaaaaagatggggctttatatttgttgattattatgatgattggacaggtagtatggagcgatataaaaaacaaagttttgactggtatagtaaagtaattgaaagtaatggagaatatttgtttgaataaggctaataaacctttggaaactagttttagcagaacttaaatgtaatttgcatactataatatatgaaaggaatatattgatatggacagagaagaagttggaatgattggttttgagatcgtatcatatgctggagaagctagatcccaattattagaagctctcaaattggctgaatcaggagagtatgatgaagcagaatcattagtagaaaaagcaaatgaaacattaaacgaagcacacaactctcaaactaaaatgttacaaaaagaagctaatggagaacatgtagatattggtttcataatgattcatggccaagatcacttaatgactgcccttttattgaaagatatagttaaacactttattcagctttataaaaaagttaatagttaaatagatagtggatgaataattgacgtcttggtagcttaaatgaaaaattaagaccatttttaaaagggtattgcgtaataaatatttaagagtggtaaaagatggctttattatggctatattagcaattttattcggttctataatatttagtgttggtgggattggcccaccaacactcttttttatgtgcgcccggcatgggtgacaacttggtggtgaaagtccactgcaggcctggcagtaggaactgttagctgaaggcaagggtgtccatcgtgaggtggaatctgaaggaagctggaggcaaacactcgcactgacgaacagaaacttcatatcaaggctgatttgagatggatgagcttgcataacaaagtaaagtccaatactgcacaagtccctttcagtaaatgaagcagtgacatgagtggaaggttgtcacaccttactcggggaggtctcactagcgtttagtagtaacaacgaatagtgagaagtcagccgaggtcatagtagctacgttgtagcgaaggactgaacaatattcatacaaagtatagaacggaggttaaagtttacgaataggacagaaaacaatcgaagagattggcaatcggtggagagaataggtggaaccgaaagggtaagccgatgcgtctagtaaactttaggtgaaatgacagaaatgtatcgtaagtctccaaacttaatggagcaagttgttgacagaagaaacttggaaacagcagccaaagccgttaaacggaacaaaggcgctgcaggtattgacggtatgaccgtttttgagatagaggagcacattcaagcgtattatcaacccttacggaagaaattacttgatggaacgtataagcctcaaccagttaaacgagtagaaataccaaagccgaatggagaaaaacgaaagttaggtataccttgtgtgcgggatagagttgttcaacaagccatacggcaagtaattgaaccgattatagacccgcacttctatgacaacagtcacggattccgaccagggaaaagcacgcacagtgctctcaaacaatgtgcacagtattataaagaaggctatcgtgttgtagttgattgtgacctcaaacaatgctttgacacgctcaatcacgacaaacttatctattatcttgaacagtacatccaagataaaatgatactgaaaattatccgtaagtttttgagagcgggtgtaattgatttgactagcgaatttatcgcaagtgaaacaggggcaccacaaggtggtgttctatcaccgcttttgagtaatgtgtacttacatgaactggataaagagttggttaaccgtggtcatcgatttgtccgatacgcagatgactttgtcatctacgttaaatcaaaacgagccggtgaacgggtaatgaacagcatcacacgctttattgaaaaagacttaaagttaatcgtcaatcaagacaaaagccaggttgggtctcctacccgtttaaagtttttgagctgtctgatgaagcaagtgaatggggattatcgttttatccccaccaaagaagccaagcagaaattcaaacgcagattgagaaagctgaccagtcgtaaacggccaggtacttttaaaaagataatgactgaaattaatcgagtcacccgcggttggattaattactttggtttaggcttcattaaaagttttatcaaagaagttgagcaatggttaaatcaccgtatcagacagctgattcttaaacggtggaaacgtccacgaactattataccaaagttggaacaatatggactggacttagattcagccaaacggattgcgtattcacgcaaaaagtactggcgactgtcatgcacacatgaatttcatcgtgcaataacaacagaaagactcagcaagtggggcttagttccactaagcactatcgctgagtctgcttacgcaagatattgaaccgccgtgtacggaaccgtacgcacggtggtgtgagaggtcgactagccaattaatggctagtctcctactcgatttttggtgatgaaaaaggccagtagattccttatcattagtcaagtccaattaaaggagaatctacatgacctactcaataatatacgaaaattgtttgatctgaaagacccaaatattatttttgatacctctttttttgaacgcattcgaggggtggagcataaaatcatcaccgcttggctgacctatactcctgagacttgtgccaagtgtgggacaaccaatgaagcttttacggtgattaaaaatgggtccaagatctctcgtattctgttgggacacctgaatttaagccccatcaccttaaaattaaaaaaacaacgcttcttctgtaaagcttgtcatcaaagcttttgtgcagagactgctttggtcgaccgtcactgttttatttcaaacttagttaagctggccgttgctttagaactccaacagacccaagccatgacggacattgcccatcgcctaacggtatcgccctctactgtgatccgagtcttagaggcagtaggggagactttggatcccgataccactcgcttaccgaaacatttattgtttgatgaattcaagtctgtcaaagcagccaagggagccatgagttttgtctatgccgatagcgaaaacagaaagctcatcaatattgttgaaaaccgacaacagtcggaacttctttcttatttccaccgctatccttatcccgttcgacaagcggtcgagaccgtcaccattgacatgtacagtccttatctttcggttattgcctcctgtttccccaacgcacggattatcattgaccgcttccatattgttcaacacttgaaccgggccttgaatcgttgtcgagtggaggtcatgaatcaattgcgctatagtcgcccccgagactaccgtaaactaaagaaactgtggaaatgagtcttgaagaatgagtgggatctcgatttcattcactatcagactcaccgactctttgaaggggtcatgaccgaaaaaatgatcgtggattaccttttaaacttagatgaagattttgcctggatctaccacttaatcaataacgtcaagcatgccctccatacgaaccaattccatgcttttcaggctgctctcgaacagagtcgccaacgtccgttaaaacgctatgtgcggacggccttccaatcacttgaacgttacttgactccgatcgaagccagtttccattatgccttatcgaatggccccattgaaggaatgaacaataagaccaaaaccttaaaacgaaccggttatggctaccgtcattttcaacacttccgttaccgcagtttaatctttaactgattaactgaaactgagcagtcgctcctccaagataatggagaagcttaataacaagaattaaattaaggccccctgctactttgatagcaagctactaacggtgttactaggggttgaagtggctgtcttcagttttttctgtcaagatatcaacacaataatgatcattatagtctcccctcaatgaggagctagctacccaatttctttatcgttcaccattgatagcttttcgtacaaattctaaagaatcaaaaaagataaggtaatcgtcctacacaatctcctcactaacattatttgacaaagtggtcttatacttttggattaaaaatttagaatttaaaaatatagagaaattaggttctatctctattaatgtaagcgcattaatattatggttttagtagaaatataattatgcagtaaagaaagaggtgcgaatatgaaaaagcattgtttttattggtgaatcttggcctatctgttagatctcttaaattgatgaaaaataagagtggaagttagattaattagcaatatgaactattaaaggtaatgattttaagaggtggttcgaggtaagcactatattacaaatatcaatttacttaccaaaacatgtttaattttaatagttatgttagcgcttacttattactctttgtctgatgaattaataatatattaaggagaatatttatggataatagtaacgcacttaatcttttaaaaaaactggttctataatatttagtgttggtgggattggcccaccaacactcttttttattttttttatttttggtaatgaaaaaggccagtagattccttatcattaaattaccacatccaattaaaggagaatctacatgacctactcaaatgatatacgaaaattgtttgatttgaaagacccaaatattatttttgataccgcttctttttcagcccctgctgaacgcattcggggggtggagcataaaatcatcactgctcggctgacctatactcctgagacttgtgccaagtgtgggacaaccaatgaagcttttacggtgattaaaaatgggtccaagatctctcgtattctgttgggacacctgaatttaagccccatcaccttaaaattaaaaaaacaacgcttcttctgtaaagcttgtcatcaaagcttttgtgcagagactgctttggtcgaccgtcactgttttatttcaaacttagttaagctggccgttgctttagaactccaacagacccaagccatgacggacattgcccatcgcctaacggtatcgccctctactgtgatccgagtcttagaggcagtaggggagactttggatcccgataccactcgcttaccgaaacatttattgtttgatgaattcaagtctgtcaaagcagccaagggagccatgagttttgtctatgccgatagcgaaaacagaaagctcatcaatattgttgaaaaccgacaacagtcggaacttctttcttatttccaccgctatccttatcccgttcgacaagcggtcgagaccgtcaccattgacatgtacagtccttatctttcggttattgcctcctgtttccccaacgcacggattatcattgaccgcttccatattgttcaacacttgaaccgggccttgaatcgttgtcgagtggaggtcatgaatcaattgcgctatagtcgccctcgagactaccgtaaactaaagaaactgtggaaatgagtcttaaagaatgagtgggatctcgatttcactcactatcagactcaccgactctttgaaggggttatgaccgaaaaaatgatagtggattacctcttaaacttagatgaagattttgcctggatctaccacttaatcaataacgccaagcatgccctccatacgaatcgattccatgcgtttcaggctgctctcgaacagagtcgccagcgtccgttaaaacgctatgtgcggacggccttccaatcgcttgaacgctacttgactccgatcgaagccagtttccattatgccttatcgaatggccccattgaaggaatgaacaataaaaccaaaaccttaaaacgaaccggttatggctaccgtcgttttcaacacttccgttaccgcattttaatcatcaaccggttgacagagacgaaggggcagtcggggcgaccggtcttacgacccaagcagacggcttaacaataaaacaaaagccctcgacacgtgctgccttgacaaccaacctcctcggtggaccttgagtccggaaagaccgactcccaattgcttgtccaaagactatcacaccgatgctcatgataaggtcagctctgctctaaggaatgggtcccctatgctccctttattatcaacccaaacagctactattctgattaatccgaaggaatcaaaaaaagaagggcgatcgcccctctctttcatctcaccaacactacttgacaaagaaccaaaaaactataaaaatcaatactgttctaggtaatgagaaagaattggctgatttcttacaagaacttttgaaagaaaatggtattccatcaaaacaagttgagtatagcccaggtcgtaatggattaattgctacttttgaaggtgaggaacccggttcggtacttggtttctcaggacatttagatgtggtaccagtaggtgaagttgagtgggagaatgatccatttgctgctgttgaaaaagatggaaaagtatatggccgtggttcttgtgatatgaaatctggacttatatcagctattgttgctttaattagatttaagcaaaacaaagaaaaatttaaggggacaattaagtttattataactgtaggtgaagaaacgtcttcccttggagctactcagttagtaaaagcaggatacgctgatgacttggatgccatgatcattaatgagcctactgatttaaaagtaggtgtagcacataagggagcattatggccacgaattactacttatggtaaaacggcacatggatctatgccacatagaggtgttaatgctataaataatatggtcaaattgattaatgaattaaataataccattgattttttgcaatataatgatgagttgttgggggaaccgacttcaagtataaatattatacgtggtggtagcgggactaatgttgtaccagataaagctactattgaaattgatatccgaacagttcctcaacaagaccattctcagatcaaaaaagacattgaagaaattttagagaacttatccagaaaagatgatgattttaaatacgaaattgagtatgttaatgacttgctagcaattaaaacagatactgaagatccatttactcatctagtcagttcttcagtgcaagaggttttagaagatagtgccactgtctttgcaccatcatattatacagatgggtcagaatttgtgttagctgataaagattttccaatcataataataggtccaggtgaggaagaaatggctcatcagccaaacgagtatgtagacatagaaaagttctatgacatgatagagattaatacaaaaataatgaaaaacttttttgcgcaataatatggcggttattggaggataaaccatggataattatatggaagttgccaatcactggactctatggattgcgggagcaccattggctattttaacagttgttcaaggggtattatttttaagaaaagctttgaaggtcagaaaagaagttgatctgaccaaagacgaggctatgaaagcattgcgtgtaggagctactgcctcaattggtcctgcatttggtgtatttgttgtgatgttaggcttaatggctgctataggtgcccctttcgcttggatgcgtttaacaaccattggttctgcccctatccaattatcagctgctcaacaagctgccgaagctatgggtactacgttaggtggcgaaggttacggagctgtgcactttgctaacgcagcttgggttctttctttaaatgggatgtcatggctaatagtaacaggactattcgcacataaaatggacgatataaaagagaaagtttccggtggagatccacgcatagtaggtgtcttaggatcaggtgctatgataggagcttttgcttacttgttttcttctgagttttttacagggttagaacgtcctgatactgctggatatttagcggctctgctggcttctggtgtttctatgataggtcttagtttactagctaaaaaatacccgaaattagcagaatacaatttgggtattgctatgattattggcatggctgcagctgttattgtgaataatttcgttggctattaaggaaggagaaagtaattatggtaaataacgagcagtacaaaaaagaatttacagcgcctataatccgtatcggacgaatttcccaatttatcgcaatcgttttaagttttattccagcgatatggctttggtggtatttcggattatttccgggctggtcaagtatattaaatggatggatattggtactttccatttttggtgtttatgctatagtagaacctatttcatactttccgacactaggcctaccgggaacatatttatcttttttatcggggaatatctccaatatgcgtgtcccagcatctgcaattgcccaagagagtttaggggtcgaagaggggactaaaaaggcagaacttatttctacaattgggattgtgggatctattatacttaatatcattttgataacactgggtgcattctttggaagtaccattttacaagttttaccggacacaattgttgaggcatttagctatgtttctccagctatctttggagctatgttcttcatgtttgtattaagaagtttttctattggaatatttgcaatagtagttgcgcttactttaggtttcttaggtatttttccagagtggttaagcatattagtttgtactttctcctccattttctttggactgtggttgtatcgtcgagagaaataagttaaatgatataaatagaattagaggaaatgcgcaatggatgaacttggcaaaagtaagagaaaatattgaatagaaggtagaaaaccgctggtatatacaccaaaaaaattaggttttgattcacctaaaatctacaaattaatttattgcagaaaattgtcggtctaataaacagaatttttcatatcttctttttagagataattgaaaatcaattgttatttgctttatctatttgacaacagtagaatgactatttttgctctgccttcgagcgctctcgaatagtggtcaattcttatgacaaggtgtgagattagtaatgaagtggaattagtcacagtatttgtctaggaaaactaaaagttgccataattagacttgttacgatatttcttttgttagatcgacgagatgatttggtagggtaatgtgaattgttattatatgaattttagattatattaatataatctaaaattcacattgcctttaatcttcgatagtctgggaaaaatccagatccaataacaaatatccggcgattttcttcaagggaattgccggtttttactttaagggtaagtttttcagcctaatcatattatttttttatcaaaaattctgagattgatttatcgattatcaaattgtagatttcaagtttaagttagccaccctgcgattaaattttctaaatttcacaaagttatagttttgccgacggtcactgcttttgctttaggtggggatgggcaggataccgcgaccacaggagcgggttgtattcggattgatttggttttaaagccaaatccacacacaagccaagtcatgcccagcagtgatcctctgtcaagcaaaagataatgactatctctgttgcctaattgcttcaactctcggataaaggcttggtagggcgaccgatagcccaagatttttcgcggatacctattcatccattgttggattcgtctgacctgactgtcggttaaatcttggaaagattggtatttgggtaggaagcgccgaatcaattggtgttggttctcactgctgcctcgttcgtaagaagcatagggatggcagaagaaagaaaggatgtctttggagacttgtctttacctgggacctacctccacttaaatggcgagccacttggggaatttgacagccactatgaccaggtgcgagccttcttacaagacaagggcttcagctttcaaaattttggggtgagcggtcatgccactaaggaggacttgctggggattgcccaggctatcggggctaaaaagacccttgcttggcatacttttgaacccgacaagttccgccaggctttagagggtgaagggttggacactttccaagttgagccaggggaagtatttaccgaagaagatttcttgtaaatttatgttttttctagtcctttttcggccaaaacagggtataatatgaagcaaataaggaggttgacagctatggaccggttagttgaattagaggaagctagggatgcagcggttgacgttttagaccaaattgattcagctactgataccttgggcaaggctaagttttggggcaattgggatatgtttggcggcgactttatggtctcttgggtcaagcggcaaagaatcaaagtggccaatgaggagattacagatatttcctatgcagttgatcatttgcgccaagagctggccgatgtggacatggtcttaccggagacggttagtgacaccctgtctgacaatatttgggacctttggctggacaatttttttaccgactatatggtccaaggcaagatcaaggaagccatcaagcaattggaggactttcgtctagttatcgaagacctgatcgttaaaatagacacggaaatcgacctcttggaagacggactggaaggggaagaagacgacccattcgaggatgagatttggtaggggttgctagctatcgctttaatagatttaaatgaagaggctaacaaacaccccaactcttgtctgtcaagagctggggtgttttagtcttatttgaataaagaatcttgtcccaaccggtaatgcatgataagggttagggcacagataaagagggagacggcaaagatgggcagtaaaattggaatgtagtgagctactaatagaaaaatcactagggctatcaattggtagagggggatcttgtagtcggagaaaattagttggacggcacttgctatggcctcgccaatattgtagccataactcgcaaagatcaggtaattgcaagttaagatcaagaagaggagaccgacaagtatgatgagaaggttgaggacaatggagagagatgagataaaggcataaaaggaggccaacaagcccatcgctacgttaaagaggagtccgtccgcaaagttccgcaagtaattgcctttaaaataccccagatagcggttcatgacttggtcttcttcctcgttgacaataaagtcccggatcaaggcaaagagactagccgttgccgggaaaacgaggaggggtaaggagaacagcaagaggatggtggataagatggctgcggtaaagtccttggcaaagatctgtaagatgataaagaggaagacggggaggttgaaaagggaccagatcaaattgcttttgacactaaagcggaaaatctggttgaaaaaagtaaaaggctcagatcggttgaaatttctcaaaagtgatggctccttaatggatatgtcttatatgtaaaggaaatgtaaaattgtgattttatatcaatgtaatctattctaccaaaaatatgaatggataccaatatatctgaaaaacttgttagattttaaaccacagaccatgcctaaagccttatcccataccaaaatgaaggcagccactccaaccaggtacccattttgagaatgtaaagggaaaaatgttttaagataatataactaaaataatttaatctaaatgtaacatttatctcttggtagaacaattttgagaaaatgttgggggactttcgaagaggggtacttggtttgagcttatagactacttttccagtggtatataaatggatcagtaaaatatttgctaaatataatagccccaaagcttcttcattgaaactttggggttttcagtgcttttagtactgtcaatttaccgcttgtgccacaaaataaagttgtcaaataaattgtagacgtgtggggtcaccaggcgggcttggggcaggttgatctcgcctgaagccagaacttggtaggttttttggtcatctaagcggtctcgggcctccctttccaggttgacttgatccttgcttgaggcaggcagggccaagtttttgccgtattttttgacttcccatcctttgaaggcgtagcttttaagagggaagaccacatccaggtagtggctgaggtctcggtaggtcaagttctctggaaagtctaaaaagtaaaggtcggcttgaaagttatgtgtgataaagtcgattaagtcttgtccctggagggaagttcccaaccaggcttcatagtttgggtcggttgtctcagcttcgtcggcttgtaaggttactagcttggcctggtcggcagtgacttgtttttgaccagtattttttccgagaggtaggggattgcttccaactggcttagcttttctgtgacttgaattggcgggacggtcatcgacttttccttcttcactagtcctagccggagcttgcttcggccaatcgcttttaatattaaaggactggtagcccaagtagcggccccgagttcctggctggacatagcttgtgccagaaggagtgatcccagcattggtgaagtgctggtggccggcaataaggccgtcaatctggggataagccgccaggatttctccggcctggtcttccaagttagggtaattgtagcggtggcctgtcatggggtccaggctaaagccaccgtggtaggctactaggactaagtcaacttgactagcaatctcgtccagccattggtcgactgcttccagggcatctcccaccaaggtctgctggcgcacttctggccgggcgatttggctgtagccaccggttaagaggccaataaccccaactttcaccccttggaccgtcttgatggcataaggggggaagattcgctcaccttcactgtcaaagagattagcacaaatataagtggcctctagcttctggacttgggtgaccaaccagtctaggccatagtccaggtcatggttgcccgggatcataatgtcatagcccagacggttggccactttaacaatgggactagggtcagactgaatatagtggaaagtagcttggggactcccggttaggaagtccccattgtcaactaggaggctggactcgttgataaagtcagccacctggtttaaaccttcttgtgcataagcgtgcacatcggtcgtagacaaaatttgaatttgttgcataagctcacctagctaacctaattttttccggatccaggaagacaattggtcaaagattaagacaatgataatgatggccaggaggataatggagacccggggccagttacgggcttgtaaggcaaagataattggggccccgatcccaccagccccaaccaaaccgagtgtggtagcggaccggatggaaatttcgaagttgatcataatataagtgaaggcaggactgatggtctgtggcaggatagcgtattggaaggtttggaagctggttgcgccagaagattccaagccttcaatgggtgttgagtcaatggtatccatggcctccgcaacttgcttggccaaggtaccaaccagttgcaaacccagggccagggcaccggcaaagggtccgggaccgaccacaataacgaagatcaaaccataaatcaaggtagggatagcccgcaagatatcgagcaaaaaccggccaacttttgggacaaagctattttggccccagataatattggaactaagcaggataaaggggatggaaattagtgacccgatgatggtgccgtaaaaagctatggcaatggtttcgaccataagagggatgagggactcgcccgttcccgtataaatataagcccattccggactggtcagaccaataaaggtcgaaactaggttgtccaaagaaaactgactcaggttggaatagtccagggccagcatggatagaataactaaggctaagataataaagaagaattttttggtatcgaattttaatcttttttgactcatttaggccatctccttctctattaagccggtgatccagtcaatgatcacaaccatgagcaggataaagaggataatgacggctacccggtcatagcggaggaggctcatttgggcgttcaacatggttccaatcccacccgctccaacgtatcctaaaacagcagaagctcggacattgatctcaaaggcaaaaaggctgtaggaccagaccaaaaattctacttggggccaaacggagttaagggcaatttgaaagcgggtggccccaactgcttcatcagactccaaggggcccaggtcaatgttttcgattgctgcgtaaagccactgggagacaaccccaaaggtaaagatggtgatggttacaaccccagtgaaagatccaatcccaatgatggttacaaagattgcccccaaaaggaggttaggaatggtccggacaagggagaagaaggtccggaagatgaaggtaaccagcttgtttttggtcacaatttcagtccccaaaaaagctgcagggatggctaggatgacaccaaaaaaggtcccagcaagcgacatggccagggtttccaaaatcggaaccaagaggtcaggaatataggcgaagtcaggtcgggcaaagccgtttagaaagttgactaagtaagactggtcagaaaagacatctgaccaagatgagttaatagcttgggcagacatgaagaataggaggaggataatgaccaagatgaggagcttttggggtagcttgtcgtgaatagtatcttttaatttcaagcctatgcccccctcttgtcttggtcagagaagatgtcttgtccgtaaatttcacctaagcgctggtcggtggcttcttcggttgggccgtcaaagacaatctccccactccgcatcccaataacgcggtcggcgtattcccgggcaaggtcaatggagtgaatgtttactaacacagtcttatttaagtcctggttaatggtccggatatcatccatgacagacttagaggtaatggggtccaaggaagcaacaggttcatctgctaagataatatcagcttcttgaaccaaggtccgggcaatggagactcgctgctgttgaccgcctgataagtcaccggaccgggttttcaacttgtcacccagccggacttggtctagagcttgttcaactttctggtagtcttctttggagaatttgccaatcaaagattcccaattgctgtaatagcccaaacgacctgagaggacatttctttggacggtgtttcttctaaccaggttaaagtgttggaagatcataccgatattccgtctcatgtgccgtagttctttaggcttggcctgggtaatggacttgttgtcgataaaaatttcaccttcagtgaggtcgatcaggcggttaatggaccgcaggagggtggacttgccggcaccagaaagtccgataatggcgataaattcccccttatcaattttgaggttgacattgtttaaaccgacagttccgttgctgtaaacaatgcgggcgtttttaaattcaatcatctatctctctcctatacatgactcgaaaacgaacaggacaagatgaacggactgcaagcttagtcagcagccagttcagtgtattggtttaaggtgtcgtaggcttcttcgtcaggttcagtgtagtcttggtggccccataagcccatgacttcttgaccggtttcgtcttcaggcatttgtctgaaagcctcagcaatttggtcttttaggtcttggtccatgtcaggttgaaccgcgatggcatcgttaggaatgtcaccttcagtcaggtaaaggacacgcaaatcttcaactaaatcgttgtcacccacagcgtcttggaaaacatagcgggctccttcaaagacaaaggcggcatcttgttgaccgttgaggacagctgtcaattgagatggaatgtcgttaacggtggtgaaagtgataccactgaggtcgatacctgcttcgttcatttcagccacagggtagatgtaaccagcagcagaagaaggagacaaggtggcaatgttagctccagccaagtcttctaagttctgcaagtcgctgtctgctttaacgaggacttctcctttgaaagatggggttgtttccccttctagaggctctccagtttcccggtcataggcttccagttctgaggacaagacagcttcagctgctcccatgtctcgagcttggacgtaggcggcaggtggcatgattcccaagtcaacctggcctgaccccatggcttggacaatggtagaaaagtcagtcgccagtgtaacgttaacgtctctgtctaattgttcggacaggtagtcttcgaaaggctctgccatagcttccatggagccatcgttgttggttgggacaaactgaacttgtaaggtctcaggagaagtgtcgccaccctcagctgattctgtgtcaccttcgttattacacccaactaaagcgagcgtagcagccgacattaaacaaaatttccgcatcattttttccaaaatattcactccttaataaatactggccttattatacaagggacatgtagacttccagtcaatttagtgtaaattttaagtaaaacacctatcatctaatcataggataacgctttaagcaagagaaaaacagactttcagtcaaaaatgaaggaatggaatattttgttatattaaaagttaataagacatccaaagcttgttcctggctcctacccaagatgcttgtagctaatggcctcgtcaaagatattttgtcacttgtatttaatcttagctttgcatataatgaaagtgatatcttaaagtgctttcacaaaagatagtaggaaggaacactggcttgataaggaccagcgattgaaaccgctgtcagtgtccacagtgctagtacataaagtcaaattggaagagaggtggagcggtatttttgagcaaacaaagctgattggtcaaaaatcgcaagcatggattgttggaagtaaggctattattttaagggagtagaaatcaatggacgccaaccgtatcaaacaaataaggtcactgattgaatttttgagccgcattttgggggaccattacgaaattgtttttcatgtgattactgaagacaaaacctatatcgacacgattattaacggccatattagtggcagaaccgaggattctcctttaactaagtttgccttggaattaatcgagtccaaggtttaccttgagcggcactatgtgacccactacaagaccgttaccaaggataataagcgattgcaggggtcgaccttttttattatggatgaagacaatcaaacgattgacggtatgttatgttttaacctagactattctgggcgggtggacttggccaatgctattttaaaagacctcaacctgtccttgctgccgggtgagttgcagactgaaagtttagaagttgaaccggcggaagacgatttcactgaaatcctgtcagaaagcgtcaaggataccatcaaacaattcattggtgtggacttacaaaccgacaacttgaccctgacccaggaagccaggatggatattgttaaagttttagaagagaaaaatattttccaactaaaaggagcagtaaccgaggtagcagaccttctgggggtttctgaaccgaccatttaccgctacagggcaaaaattcaaaaagaaaaaatgaactaatgtcagtgtcagttactgatttgagcatggacctcaagacgaggttcatgcttttttttgtgcgatacattttagtgacgaagattcttagcttgataataaattatcctcactcaccgccagaaggcaaataattaagtgaaatgaataacagtatttttggtcctagggccattttatctgattgaaaagctgaattctctctcttaaaagctcaatattacaacatttaaaaggctttctcataccaaaccaataaaattcataaaaatatgttcattgaataacttgactgcgctttcaaatactagtaatctattattgtgatgataataaattattatcaatacgaaaaagaaaggaggctaatttggtggatttagttattggtattgtactgctcttgctggtgctggctttctttactttgtttaccttcaaggctccctatggtcggaagaccatgagtgcctttgcggatgcctcggtggcaactcttttggttgaagctttcctgagttcatttgttgggaatgtttttggcattgagtttttttcaaatttaggtgatgccgctggttcattaggtggggcagccacagccttgttggtcatcatggcaattggcggttctccagtcaatgcggttttaatcggagcttccatctacggctttgggattttgcctggcctcgttgtgggctatgtcatgtcttacttagtgaagtggattgaagacaagattccagaaggtgttgacctcttggtaatgatcttgttcttagctcctttatcaagaggactggccttgatcagtgacccggttgttacagccctcctatccaatattggccgggctattgcagccagcgctgaaagtgccccagcagtgatgggctttgtcgttggagggattatggcagttgtgggctcttccccaatttcgtccatggctctgtcggctatgctccaactgaccggtctcccaatggcggcgaccaccatggccatttggtcttcatcctttatcaacttggtcatgtacagccagctcaacttgggcggcaagagagaaactttgtcagtttttgttgagccgaagacccaagtcgacctgacatcagccaacccgcttcccatctacctagccaatattattggcggagggatatccggatcagtggttgccttgatgggaatgaacaacatggcttccagtacagcaacccctttcgcaggtttggccgttatgtttgcctataaccccgtccaacaagttatactagcagccttgatcactgtggtcatcggggccgtggttgcttttatcgttgctaaaatttggcacaaccgtcacctcccaattaccacagcagctgatttgagtgctagtgaacattcttaagttaggaacaccaccgtcaaactaccctttcgttttgaataaagttaactatttaatttatgaataggagtgtgttaaatatggctaaggaaattgccggaaaaacagtcgaacaatggacccaggctaacccctacatccatgacattgtggatggcaaacccgttttctgggtcaatgacaagaaaggaaactttgaagcagaaaaagaccaagtccaattctctgcagaggacatcaaagatgcagccgaccgttgggatcgttttgcaccgtggtttgaaattgcttttgatgacaccaaggagacaaaaggcattatcgaaggtccttacactcgaattgataactttaaagcagatgtggaaaaacgctacgatgtcgacatagctggtaatatgtacgtcaaacgggatgatctcttgccaatcgctgggaccatcaaggctcgtggggctatttatgaagtcatccaccacgctgaagagttagccatcgaaaaaggcttattgtccggttatgatgatgactacaccaaatttgcttcagatgaattcaaagatgccttcagcaattacagtgtagttgtcggaacaaccggtaacctcggtatttcggtcggggtcactgccgcagcatttggcttccaatcgattgtccacatgtcctctgatgccaaacaatggaaaaaagacttcttgcgcaaaaatggggccgaagtagtcgaacacaacactgactttactgaagcggtcaatcaaggacgtcgagcttctgaagcagaccctaactcttactttgttgatgatgaagattctatctatctctacttgggctacaccacagctgctcaacgtctggctaaacagctagaagatgacggcattaaagtggacgatgaccacccactcttcttatggttaccatgtggtgttggtggttctccaggtggtattacctttggggctaaacacatttttggcgacaatgtccacgccttctttgctgaaccaacccatgttccttccttgctactcggtattttaaccggtcagttctccgccgttcacgtcggcgactttggcattgatggccaaactgtcatggacgggctagctgtgcctcgtacttcccaatttgtgtcacaggtgatggaacacttctttgacggaggttacaccttaaccgatgatgaagccaaccataacttgacccgtctctacgatactgaagaaattttcctagaaccagcagcgactgctggactatcaggccctgcctacctcttcaagtctgaagaagggcaaaaatatattaaagacaaaggcttgaacatggacaatgccacccacattgcctggggaaccggtggctcaatggttcctgaagaagaccggaaagtcttctaccaagctggtgtcgaaaaataaaaaataaagggcttgcatttacccttttaaagtggtagagtttagccacaaacaaaatattccgaaaaatataggactagtaatggaaggcttatttacagaaaggccatggtggatgcgaatggtcagtaaccctccatgaatccccctgtttagattgaagacgtaagtcaagttgactaagtcattccggtagccgccgttatggtttgagtgtttgggtatagctgtacccaaatagtagggtggtaccgcgcaatgaattggtattaaactgtttcgtccctaaaagatgtctggtcatcttttaggatggcggaacagtttttttatataaaagattaggagagtggcaaaaatgattgacatgaagcagttgaaaaatgattttgaagctgtcgcccaaaatttagaaacccgcgggactagccgggaagacttgcaaaaggccctggactactatacccaaagaactcaattggtagctgaattagacaagttgcggaacaagcgaaataccgtatcagaagagattggcaagcaaaaacgtgcgggtcaagacgctgacgaccaagtccaagaaatgcgggacctgggaaaagaaattgaggccaaagaaaaacgagtccgcgagctagaggatgctgaatttgaaatcatggcccgggttcccaatattgcagctgaagacattccagttggcgaagatgaagatgccaatgaagaaatccaccgcaaaggcgaccagcccagctttgactttgaacccaaagcccactatgaattaggggaagacttagggattttagactttgaaaatggagcccgggtagccggttctcgcttcttgtactatcttggcttgggggctcgcttggaacgggcggtttataactttatgctaacccagcaacatgagaatggttatgtagaaatgattaccccttacttggtcaatgacaatgccatgtacgggaccggccagtaccctaaatttaccgaagatacctaccgggtggataatgttgacgaccgcagcatgagcttgattccaaccgctgaagttcccttgaccaactacttcggagacaatatttgggacaaggcagacctgccctttaaggtgacagccctatctccttgcttccggtcagaagcgggttcagctggacgggacacccggggcttgatccgcttgcaccagttccacaaggttgaaatggtccgaatttctactccagaagattcatttaaccagttagaagaaatgactgcaaatgccgaagacatcttggctaaattgggcttgccttaccgtcgtattgtcttgagtactggagacatgggcttttctgcaactaaaacctatgatgtggaagtctggctaccagcccaagatacctaccgggaaatttcttcctgttctaactgttacgacttccaagctagacgggctaagatccgcttgagagatgaggatggcaatgtccgcctcgcccacaccttgaacgggtctggtctggcagttggacggaccgttgctgcgattatggaaaactaccaaaatgcagacgggtcaattgacattccagaagttctggtcccttacatgggtggcattacccaaatcaataaagaaaacgcccttggtaaaaaagttaaatagaagttagatggttcacctataggctccaaggtcttgaaaaatttgtggttgatccagctgagtttaaggcccacccacaggctcttgtcttgggtgggctttattttgtcgggttttttcactggagttaccagctaactcaaaatttattaaaccaaacattagttcttattattggtctagtcacaaatcatgctataatagaagcaattcaaaacaggaaaattggatgcaaggagctgatgggatgcggattttacatacggcggactggcacctagggaagatcgtcaatgagttctccctcttggacgaccaggtagccatgcttgaccaattaattgacattataaaagaagagaaaattgatgccctcttgatggcaggcgacctctacgaccggggggtgccgcctaagcaagcagttttagcctttaacgacttcctcaaccgaatgatggctgaagtcaggatccctattctaatgattgcgggcaaccacgacagcaatgaaagactagaattcgggaccggcttgtttaaggcaagtgacgtttatatagaaggaacttttaagcctaagactaggatggtggatttaggcggggttcatgtctacctcatgccctttgctgaccatatttgggtccggcaagaattggatatggaagaccagattaaaaatctggaagaagccatccaagtccaggttgaccggattgtccaaggtcctgactttgaccctcatgtctttaacatcctgaccatgcacggctatgtggtcaaccagagcagagattcgattgaagagtcggactccgaacgccccttaagtatcgggaccaccgaatatgtggatgcttccattttcgacgactttgactatgtagccctgggtcacttgcatggtccccaaaaggtaaagcgggagtccatccgctacagtggctccttgctcaagtactctaaatctgaagtcaaccaccacaagcaagtggttattctggatatcgaccaggaccgggacccggccttgaatcttgagacccgagacctcatcccgaaccgggacatgcgggttttgcgcgggagttttgacgacttggtccaaggccagtctgacgactatatcttttttgaactagaagacccggcttatattatggatgccatgtcccgtttgcgcaaaaaataccccaatgccatggggatcgattatgtccatttaaaaggaagacaagtcgatcctgcaaggggtcaagatgccaaagacatgcgacacttggctattgacgacctcttccagcagtttttccaaaagtatagggggaaagacctgaccgaccagcaattggaaatagtccaagaagttgccaaccaggcgatccaggaaggagatgaataaatgagacctgttcaattagtcatgagtgcctttggtccttttaaggacaaggtcgttatcgattttagccagttcaaccaagcctctctatttcttttgacgggaccaacagggtctggcaaaacgactatctttgatgctatctcctatgccctctacgggtcagccagtggccaggtccgggatactagcactctcaagtccgattacgcagacggcagccagctctgctatgtcgacttcacctttaccctaggcgaaaaaactgtccaagtttgccgccagcccaagcagatcggccccggcaagaccaaggctggggtccagttgaatgccgagtttaacctaaaggtggatggccagacttgtgagaccaagatttcggaatccaaaagggccatggaagacttactgggactcactgctgaccagttcaagcagattgtcatgctgcctcaaggagagttccgcaagctccttaccgctagcagtaaggacaaggaggcaatcttccgcaatatttttaaaacggataatttccagatctttgaaaagatcttatccgatcgctacaagtcctacaaggcagatttagacaactcccaaaccaaattggaccaagttcttgatgccattcaggtggaagattgggataaaaacactaaactctgccaggctgttaaagaagaagactattctagcataatggaggagcttagccaggaaattgaccgggaccaagcccaagtcggtgccttagaccaggctattaagaaattagagggggacttgaaccggctcaataagtacattgaaaatcggcaagaattggaccggcttatcctgcaaaagaaagacttaaaccaggctcaggaccaaatcaaggcctaccagaagagtttagaccaggctgatcaagctaaaaacttgcaggaagtggaccaaaaacgggccaagacccaggataacttaagccaaaaccagcaagctaaagagaagctggacagcaagttagcaggtttggaaaaagaagagaagcaagttcaaaagcaaatccaagcccaccaagaaaaacttgctgctatcccaaaaatggaagcaaaccgccagcaattggaaaaagagaagggactttggcaagacttggcccagcggtttgaagcccttgagaccttgaaggtgaaccagtcccaagcccgggaccaggaaaaagacaagctggaaaaattaaaagcaaaccaagaagccaaagcagacctagaccaaaaattatggcaattgccccagtggcgggataaactgaaggaagccgaagctaaaaagaccaggctagaccaagctgggcaggaggccgaccgtaaggaaaatgacctggcccaggctttggttgatgcccaaaaaatccaagccatcaaagaagaggtcaaggccaaagaagcagcttttaaagaggctgaccaaacttatgtcaagcttggccaggcctattttgccaaccaagcggcccttttagctgatcaattagaagaggaccagccctgcccggtttgtgggtccacccaccacccagcaccggcccattttgaccagggggaagtcaccaaggctgccttggatgcaagtgaagcggctaaaaaccaggcccaagcagccctgacccaggtggaaagcagtttgcaccaccggcaagaagccttggccaaagccctaagaccctaccaagtcagccagcctgacttggaagaagcccacaaccgggcctatcttgaccgaaagcaattgcaagaagaagctaaggaaatggcatcccgaattgaggacttgaaccaggccctagcccaagaaccaggctggcgcgaccaggtagaaagctactctcaggacatagaagccctccaggccgacttgcagaccctcaaaaccaacttggaccgcgaccagactgaccaagccaaactggaagccgaagttgaggacttgcaaggccaattaagtcaggagtctaaggaccaggttgaagcaagcatccaagatatcacggctaagatagagggtatccggcaaagggaaaaagacttgcaagctcaccaggcccaagtcaaccaagacctgacccaaaaccggaccagctttaattacacaaaggaccggatccaagaattggataaagaattccaagactactccaaagaattcaatgacttggccgctaaaagtgaaatcggttctgactaccagtcttatttgattagtgaccaggaaattgaccggcggaaaaatgtaattgaccaacaccaggaggcacaaattaaagtggcttcaggcttggagaacgttaaaagcaaactacctccagcagaagaccaggttagtttagaagaagccaaagcccaaaaagaagacctgggtcggcagaaggcagggcttcaaggccaacgagaccaggtcaatgttcgcaaagaagccaacaaaacacacttagcagacatccaaaaatactaccaagaacaagctagtatctacaagactgccagcctttacaaagacttgagtgacctggcaggcggcaagtcggctgaaaccaaccggatttcctttgaacgttatgtcctaggggtctactttgatgagattttacaagctgctaacttgcgcctcgaccagatgaccagtggccgttttaacctagagcggcagcgggacaactttaaaggaagtggtggcaaggggttagacctagaagttttcgaccaatttaccggcaagaaacgaccggtctcttccttatctggtggggaaatgttcaaggcctctctttctttggcattaggcttaagtgacgtgatccaagggcaattgggtggggtccaggtcgacaccctctttgtggatgaaggctttggtaccctagatcccgactccctagaccaggctgtccaagttttaatggaactcaaccaaactggccgcctggttgggatcatctcccacgttgaagagctcaaagcccgtatttcctctaaaattgtccttaagcgccaacaaaccggcagtcaagtggaaattgaagtctaaatccccactttttaaggagtggtgtttttcaatcctagcgagattaactgcacccacttttggtctgacttacttgagggaggactggcagtaggcaataagttccaaaagctagattttatgacaaaggagttttgatatgttgcagacaatcttatcggcagggggagtctttgtggctaccagcatcgattacctggttattttgaccctaatttttgcccaagtttccgggaaccagcacaaggctgccatttatgccggccagtacctggggaccgggatcttagttggggtcagcttgcttgcagcctatgtggtcaactttcttcctgaagattggctggtcggcttgctgggcttgattcccatcttcttaggaatccgtcaagccactcagggagaagatgatgataaggcggatggggcagtatttgaccagctagagcaaaaccagtctcgccaagttttttggactatgaccctcctaaccatttcttctggcggggacaatttaggagtttacctgccctactttgcttccttagcatggcaggaaatagtggtcgccctcttcgtttttgttatcggaattgttatcctttgcgagctcagccaaaaattgtctgagaccccctttatctctcaaacagttgaaaaatacgaacgagtcctagtcccgcttgtccttgtcatacttggactttacattatgtttgaggctggaactttgcaaaaattgttaagcatgaccgtttagctcaattgaatataaataataaaaaggagccacagattcttctgtggctcctttttatttggagagttttaaactgaaaagttggtaatggtgtatcctggttcattatttgtcggcttgtggataggcgaccaatcagttgccacagggggactgggtcttttaaaacgatcgttattatcaaatttaggcttaagtataaggtatttactggatttctcgaacaacaaacgttatatgagaatttagatactggtactttcaaagttgaaactagagaataattcagaattgggaagttttggatttgaaacgcgacaattgctgagcaataaaggagttctggagcaagaacgcgacaattgcccagcaataaaggagttctggtgcaataacgcgacaattgctgagcaataaaggagttgtgaggtcataatgcgacaattgctgagcaaaaaaggagttctgaagcaagaacgcgacaatcggtgagtaataaaggagttctggtgcaataacgcgacaattgctgagcaaaaaaggagttctggagtcaagtccaaaggaaacaggcccggaccgatcaaagggacattaggcggagcctcttttaataaatattgctaggtatccaataattaaagtttaaccaaggcaaaaaagttccaggcgaatccggttttttgtataacttttgttttacataatcttaacagctttttggtaagtaaattaataatggagggctatgctataatcgtgccttgtttacccaataagcacaaaatttaagaaaggagtgtaagcatgcacaccaaacgtttaaagactttggtcgcttttctcttgtcatttctttttgtaacaaatatttggcaagttcaagcggaagaagacccggctgccccggctctagaatcccaattagtggatgaaggccagggaaaccaggttgagcttcctgcagaaaatgaagagagatcaaaagattctttaactcaaacgccccctagtttgactagtggatgggaacaagaccaggcaaatggccagtcttactccccggcagaccaaggattatctcgtcagcagaccgcaccgcctgctggtaatttaaatccaggcagccaagtccagcaaggggcaagtcgtgagagtcagcaagggtctgtgggaagccagtctgaaactgaaagttcagaagattcagatgatgacgaccctaaccctgctggctcagaagatggcggggagactttatcaggagcccccgactcagcagtcgttgaagaaaaccaagcagactcagtctatgtaggaggtccaaaccaacaagagggtgctggacctgaccaagctgatcttccccaggcagaggaggaagagcctaatgttgagggagccaagtctagccaagaatctaaagacgaaccctcaaccaagcagaaactgaccgaggaaccttcccagtctaaccctaaaggccaaacccggttagctcctgaacggccagttaccaatgccaagtcaaatgcccaccgttacccagtcttgactatcggtggcgacccaagtgaacgacactttacttggtattcggacaattctgaccagggttactttgagattgccccatataatgaagcaggagacttctcccaaggccaagtgattgaagggaaaacgttccaagaaaacaacacccaccatgacttcttcggccgaaatgttccagacttatacaacacccaggtgaaaattgagggtcttgaagaagacacgacttacatgtaccggttctggaatgacgaagaaaacaagtctgacatttacacctttaaaactcacccagctggcgattttgacttcttaattgtcggtgacccccaactcgggtcaggcgacgacctagtagaagatatccgtggctggcaagaaaccttggacaccatgctagcagttcacccagaccctaactttttactcagtgttggggaccaggtcgaaattgcatggcgtgaaagagaatatgctggttttatcgaacaagatggcctcaacgaaatcaccttagcacccattgttgggaaccacgacaccttcaacccagcattttctgagcactttgccttaccaaatgtgcaagcagaagggaaaacagaagcagggtctaactactactttacttacaataacgccctattcgttgccctaaacttggaaaacaccaactttgaagaacatgaaagaaccctgcaacaagccattgaagcgactagtgaccaagacattgactggcgggttgtgaccttccaccggtccctattctcaccagccaaccactccatgaccaaccacaccaagtacttgcgtgaaaatgtggcacccttgatgaacaagtatcagattgacattgttctatctggtcacgaccacgcttatgccagaagtcatgttatggacgggactgagccacaaattgagtggactgaagctaaccaggcgccaacagagtatgttgaccctgaaggtgttatttacctcacctttaactcttctagtggcagcaagttttacgacttagaagaattccacgacttccttgccgtccgcaaccaagagtaccagaccaacttctccatcgcccatgtgactgaaaatacctttgaagtcgtcacttaccgaactgcagacttgagtgaagttgaccgggttaagattgttaaaaccaacactaattttgatgcaccccttagccaacgctttgtgccccaagctagagtccttcctgttttccaaggcgacgacctaccggaggccaaagcagccattgaaaatgcgggcgacttgccagatgatacccagtatttatgggttgttggccatgttccacaaacaagtgaagtcggctctaccactggccttgtccgcgtgaactacagtgatggttctcaagaagacatccctgtttgggtcgaaatcattgaaaagagacacgttgaattggttgacccaatttggggcaagctagaagccaaagcagcagatgaaaacaataccattcgcatttccgttatttctgatagccacattttagccaaagatctaattgccccaacgaaagaatactatgacatgctgaacttggatgctaagttctttacccaatcggaagaagtttttaaagaaagtcttcgcatcattgaccaaagaggcgttgactatgtcttgatccccggtgacttgacccgggatggggaacatgagacttacgactttattgttcgtacccttaacgaatatgtgcaaaaaggcttgcaagaaggtcgtgaccgtcgtgtctttgtcgtaccaggcaaccacgacatcaacaatccacttgcctacgactttgccaactccaccaagctgcccctttacacaccgcaggatttccaagacgacttccaagaattggtatatgatcaagctttagcaatctacaatgagtcagacatttaccaagactacttggctgaagttaacgaaagagttgaccaagctgaatcagaagaatactatgcccaaggtcacttgtcttacgtttcaagaattgacattggtgaccgcaatggacagggtggcattactattctagccattgactctgctatctactcagctgatgtgactcaatctggtcaaaacagccaagaaacaggcgggattatcacggagcctttgatgaactggttggtccaacaagcctaccaagctcacgggcgaaatgatattgtggtcgctatggcccaccacgcctttatcccacacttctacaaccaggaagaattcttgtctgattatatcctccgcaactggaacgtgccttaccaaagtgataacccactccttgatggcaaaaccccgatggaagtttttgccgacaatggcattcacttcctctttaccggacacattcacgacaacgacatttcttcctttacaactcctgaaggcaacaccctttacgacatcgaaactgggtcttcggtcagctatccaggacctgttcgtcacatgacctttatcaacgatatcgatagtcaaaacacccgtcaagttgctatttcagaaatggattcagtccgaacttttgaatacattgatgctgacggatcagttcaattgatggaagactatgtaaactatactcgagaaaacactgtcactcctcgctttgtagcgattcagattgttaacttgatcagcgactacctcaaaccttcccgtgacctgatcaattccttcttaccattaccaattcctgctcctgcccaagcccctcttcttgtcggcttagtcagtagcctcttagggacaccagaagctcctgccttccaaacttctattccagttttaggcaatgtctccctttactgggagtccgatcctactggtttaggcagactcgttgctcaagtaggaaaccggtctaacaaccgcctttacatcgaaggggaaaacttggtcactttcatcaacgacttgcttgatgagttggaccaaaaagtccttaatgaagaccaattgatcaaccgattagaaggtttagtcgaagaactctttgccgttccagtttacacccatgaagatgggagagtccggacccttcaagaattgggagttgacacctacctcggccttgctggtggagaagaaagtgtcaaacctgaattagcttgggttcgagaagcaggccagcaactgaaagaccaaaacggcctttacgctgtagtccaatacattgaagagccgcttatcgactggatttctaacttcctttcaagcgttcaattcgacctcggccagcacttacaagctagtggatttgttccagtacttggcttgccgttcattagaggcctcttgccgactaatgctgaaagtttattgggaaccattcttggctttttaggcattgacgactacaaagccttcatctcttactgggtgaattctgacctagctcgttacattatcgacccactaaatgttccggttggggaccttgttatttcatttaacgatgaacttttcaaaaccaacccgcaatacgcttacctttacgacaatgacaccagtatggctgttcaacgagacccagttgtcaaaaatggtcgggtgcaaattcaagatgcccaaaccgttaacttggtcggtgactttacagcgaacttgattccatctgtccgtgtcctcgtaaatggtcagcctgtccaagcagaagttgacttccaagaaggtaaaattgttgcccgcctcagcaatgaattggtggacggagaccaagttgctttccaactttcccactacaacgaccgggctaacccaattaccttacagtcggctgtcgaaactttcactgttcagcaagaagaacctaaccaagacttagccatcttagttggcctcttgcttaaggaaatccgtcaattaagagaagagctgcaagggcaagacccagtagaccttcaaccgatcttagacagattggaccaattggaagcagctcttgccaaccaagaaccgacagacttacaacctgtcttggaccgcattgaaagcttagaaaccaccatcctgttgctcttagctcatatcgctcaattagaacaatctcttgcagaccaagaaccggtgggcttgcaacctgtcttagaccgaattgaccaattggaagcaagcattcagccattacttgaccgcattgccgcactggaagaagcacttgctaaccaagagacagtagacttacagccaatcttggaccaaattgcagatttgcaagccagtatccaaccgctacttgcacgtattgcaacgttagaagaagctcttgctaaccaagcaccggttaatcaagaactgttggaccgaattgctgaactagaaaaatctcttgcagatcaaaaagcagccaaccaagccctacaagaccgaattgcagaattggaagcagctaataaagtgcaacaagaccgcattgaagacttagaagcaactaacaaagtactacaaaatcgaattgcggaactggaagcagctttaaaaggtcaaaaaccagatgaccaagatgcaaatcgggaccgagaagcagaattggaagcagctttagccaaacaaaaagcagccaaccaagctctacaagaccgaattgcagaattggaagcagctcataaagcgcaacaagaccaaattgttgatttagaagaagctcttaaagatcaaaagctagaaactccccaaacagaccacgagtcaaaagatcaaactgagactcctgaaaaaggactttctgaacaagcttctaaatctaaaccaaatcaattcgttaaccttaaaaacaaagcaaacagtgtggcacaaagccaatctgctaaagtgtcaacaccggtggtgaaccaagtcaaggtatcgcaagaagagtctcaaccagcttcaactaaacaaggtcagacattaccagacacagatgctgaactttggattttagctggactaagcatgaccttcttgctagctggcttttcccttcctgtattagagaaataagcttaagctagtcatagatcgactgactaatgacttaaaaagccacaaaagctttcccctgattgcttgaggccactcaagcagttagggggtttttatgttgctataaattttaaaatggttagacgttgacaggtgagagtaagcaaaaggatgattacggatttaaaaatggaaaataaatctaaatagggaggttttgaacttgaaactggacaataaatagaaataaggaaggattgaatctgaaaggcgacaatgggctagccacaatattctttcgaagttaaaaggcgaccaatcgcctagcgataaaggagttatgaggtcataaggcgaccaattacccagcaataaaggagttatgaagtcataaggcgaccaattgcccagcaataaaggagttctggtgcaataaggcgacaatcgcccagcaataaaggagttatgaggtcataacgcgacaatcggtgagcaataaaggagttctggagcaagaacgcgacaatggctgagcgataaaggagttctggagcaagaacgcgacaattactgagcaataaaggagttctggtgcaagaacgcgacaattacccagcaataaaggagttatgaagtcacaaggcgaccaatcgcagctcaataaaagagttaggcaaggtgaaactcaatcctacaggaaattttacctaatcgaatctgtattagctgtctagcaatttgaattatgttatactaaaactagttaagatatgtaagcgatttcacaggaaccatctcgtaagcaagcatgctctatgacaggtcagttcttgggctattagcgggttccggggttgcttgcaatctagaaaatgtaaccggtgtcaaagcaaacaataggagggctaatatggtagagcgatttaaagataaggttgttgttgtgacgggggctggtcaaggttttggtgagcagttttccaaggacttcttggctgaaggagccaaggtagctatgttggacatccaggccgacaaggtgaaggaaacagccgctcgattagatacgactggggcatcgactcttgcaggcgagattgatgtttctgatcccgattcagtcaaaaaggcttttgaaaaagtttatcaggaatttggtcatgtccaggttttggtcaataatgccgggattacccgggatgcaatgttccacaagatgaccctagaccagtgggaccaggccgttaaggtttctttatatggaactttttactgttcaaaagaagtgatcgatgatatgcgggaccaggaatatggtcggattatcaatctccagtccatggcccttgccggtaatattgggcaaacgaactacggagctgctaaggcggggattggtggcttgaccaagtctatggccaaagaagttggtcggaaaaatgttacggtcaacggaattgcacccaggcttgatgaacacggatattgtcaaaaccagttccagaagatatcttaaaacaacaaattgcagccattcccatgcaaaggatgggggaaccggaagaagcctcggcagctgtcttatttcctagaccagtgaagaagcgggttacatttcaggccaaaccctatttatcaacggtggcttgtattaagtaaggatataaccttggggaaaatgtggattttttcactaatatccgccagctttcttgtgggttaattttttccaaaactagcgccagtcgaccagtttcatttattacacaaaaaggctatgagcaggagctcatagccttttacttggtcaattttattgggtcaaaaaattaatggcaaattgggtcatggttttaatcccataagttaaggccccatcgtcaaagtcaaaggcttcggtgtggtggccagagcctgatccgacttggtcattttggatgcctactaggcagaagcaaataggggccaactctcggtaacggccaaagctttcggaggcaaaccaattttcttctaccagggcttccgggccgaattggtcttggatagcttggcgggcaagctggctgaggtcttcatcatttgcgacaacaggcagtagactttgggggtggccatcgacttccactgaagccttgtgggcccaggccgtattctgggcgacttcttggaggatgtcgaaagctttttggccagcttcctggtcaaaaaaccgcatagaccctgaaatagaagccttgcttgggataatattgtaggcatccccggcatggaattgaccgattcccagagtcactgtcttggtcacatccacttggttgacccaggcattggtccaagcgtttaggatttggctaccgacaaagatagggttgacagcctggtcaggtctagacccgtgcccacttttacctttgatggtaaaggtgaagacccgctgacctgccatgacgggtcctggactggctacgattttgccagtttcgataaaagaagccacgtggttaccgtaaatggcatcgaagtgaagaccagactccttgagcaaatcaatcatgggctggataccggagttgttttcttcagcttcttcaaaaataaagacaatttttccttttaagtcggccttaatattgaccagggacttcatcgccccaaccaggatggacatgtggccgtcatgaccgcaagcatgcatgacgccaggatttttggagacatatttcttttcttgctttaggttgtactcatcttcttcaaggggcagagcatccaggtcggtccgcaagcccagggttttgccgggcttgccagtatctaaaatggctacaaaacccgtgttggcagtttctaaaatctctaagttcatgtcccggcagtaacccttgagcaggtcagaggtctggtgctcctggttagaccgctcagggtgttcgtggaggtagtgacgtaagtcggtcatctcccgaatggcttgttggcaattggctttttccatcagtcccataaaactcgctccttttgcttgaatgaatgtcttaattcatttgggtagttttccaatacgatataccaaggtcctcgtatcgtcaagctttttgcagtagaggcaatctgagactagctttaacagcttccgattggcagacagtcaaactaggtcctcgctttagcaagacttgggggcaaaaaagctctagcttggcgactttgacgttaaaaaatctttccacttggagacccgtttgtataggcccagtccaacacttgtgatccacttatcaataactctcgatttaatccagttccgatagtggtacaatggtagtaagcgactctttcgggtcacaagcgggaaaaatttttgagcaaaggagggaagacagtgaaaaaagagatcctatatgtagacggctataacatgatcggagcatggcccaacctggttcccctgcaaaggcagaaccggatcggggatgccagggacttgctcttggatattttaagcaattatgccaagtatacggggatgaagatcaagttggtctttgatgcccagtttgttcctggcatcactaaacgctacgaccagtacgaggtcgaagtggtgtttacccgggaagaccagacggcggatagttatatcgaaaaagccgtgggggaggagaactacctcctgtccaatgtctttgtggccacatctgatttagctgagcagtggattgtttttcaaagaggggcagtccgcaagtcggccaatgagttatggaaagatattaaagaagccaacaagaagattcaagcagacactactttttaccaaattaacaaccgcaaacgccattcccccctgtccgacaaagaccaagctgctctttaccaactttactggaagatggttaacaaggataaaaaaccagaccaatgataaaagaaggtaaagtgggggcattaagctaggcaaaaaatcgaccttgtggcagaataggaattgggagtaaagataacggttagttgtgtgcaactttagggggagttgtttatcgaaaaggagtttagcctgacggaacttatggttttggttctacagtcagttgatggggacgtatatcaagcgcttgttgaagaatgcaagccagtgatttacaaggctattggaggccggtatattgcaggttacgaccaagaagacttgtttcaagaggccaatattgttttactcagggccattgaaaattaccaatttgggtctgatatccgcttcatgccctactttagccattgcctaaaaaaccactacaattcgctaggccgaaaaagtctagccaacaagcgtaagagcttgaaccaggccatttcaatggactacctggcagaagtttcgggccatgaatttttcttaaccaagttgggcaaacaatttgacccagccgagaaaatgatggccaacgaatcctaccaggcctatacctctagcttgtccaagtttgaaatggacgtctttaagttatacctaaagaaccactcgcttgaccagattgcccaagagctagggcaggacttggtcaaggtcaaaagtgcagtttaccgctgcaactcaaaattgaaaaaaagctttagttagaccaaattatttgcctgtcgactaactactttactaaagtcatttgccggaaagcgaacgagcactattttgttcaccgcattgaccagcccacaaaaagcacccgccgagtttagaacttgggggtgcttgttgtgtttcttggctggtcagggcgaccttggactggccaagcgagataccaggcgctatggaggagggggctagctagacttccaacggacactaatgatacaccaaaattagcttgatccagctggattttctagcagatgccaagttactggcttgcccagggtaacccttatagaccaggcgaacttttttagctaaggtctgtcgcccatttactccacgtcttggaatttcaaggcttggatatttaggtcagggtcggtttctcgtttgacaccgaggttgaccaagaccttgatgtcgagttccagggtgatattgacccgggcttcttccaagtgaccgccaatggttgaataatcctcctggcccaagatgatatggaggtgctggtggggttttttgtcaaaaattgatagggttccttttaaggacaagacttcaaaagagccttcaaattttttcgtttgatatttttgttcctcgggtagaaaatagctgagttcgacttggtccacagccccaataccggatacaaaaccggtttggatctgttctgctttcgccagttccgtcaagcattctttgattttgtcgcccttgtcgagccggactaaaatatcactacctgaacgtttgtactccatttgtttacctcctgttggcaagtctttattcctatgatggtgacttaaatgtatcacaggaccggttcagggacaagtaaatttattgctaagattgcattaattaaagggtcttgcagacaaaaagcgaagccgatctagtgatccaggcccaaactgatgagccaagctttacccagtcagggggtcaggctatattttgactatagattttgctatatttcagactttgacactttttaaaaaataaatcccttccaaagcttgatatctcagtctttagaaggggattatatggtttgaaaaaaggcgtactaattggcttttttgcttggcgtaattttacactcccttttggaagaatttcgagcttctttcaaaagcaaaaatattacctgggtagtcacctaaccgaaagtgtttggagccaggatatattttaagccaagattttggtatactgtaaaaaataagagaatggaagtgattgaatgaccaaggattatgaccgcgattgggatgactttgattctggacgggactgggatgacttggacccagaccaagaatttcagtcagaccagtctgatgaccattacttggatgatgaaaaagacagtgaccacttaaaagaccgggaagacttgatcttctcccgggccgataaggattcagattatgatgataactcttctgccttgactgaggaagaaagggaccagctccaaggtcaaaaggaaggggaggcagactataaccaggaagaggctgaccaaaaagatgctggtgtctctgccaaacaggtgggggcttacatctaccgctttattggctttatcctctttgccctagtcctcctctccaattatatggtctttgctggaattggcgtccccaatagccgggccgatattgccgaaacctacctcaacttagtcactccagccagctttacctatagtatttggattttgatttttattggggtggcagccagcctccttgctaaatatatccaccctagcgaccaggtctttttaattgaatacaagaaagtccgtttttttaactggttgtggatggtcttgaacattatctgggttttcaccctagccaatgaacaattaggggtagccagcttggtggccctcatttacaccttagtaattggcctcctgtcgaaccgggttaaggttaaagatagtctgaagagcaagttttttaccatccggattccagtgggtctccactttggctggatgattatctcaaccttcaccactttctcttactacctcgtagacctgggattagatggtactggcttccagggagttgtttgggccatgatcgccatggttctgatggttctgctttgcctttacttctaccgccaagaccggaacttagccatcttccttccttccctatggctattggtgggggtcttagtccaacaagctccctcaagctcttttgcctatgcttccacctccgtctttatcttaagcgtcctcttctttatcggaggcattgctttagccgccataaccatcttccagggttacaagaaatagaaatttttcaaagactccaggcttgcctggggttcttttttggcaaaaagcaaacaagaggggaacgttaagtaaaggataagcctggttttgtgacaaatatgttacaaagtttaaatgccaaatacatttgttcaaaatgggtgttcacgggggaaatctgttatatgatataggggaattccgaaagatcatctatgaatagaagataaatatttgtaaggattagcaaaaaggagagttagccacatgggatactttggtgatacaaaacacaaaaaagtcttacgtaagtccaaaaaacaatggattacagttggtttaacatcagcagccctgggtctagctggtttggtgcaaacttctgaattcgttagtgctgcagaagacccagaagttgacaaccctgctgagcaattgaattctgatgatcaggaagatgaaggtgaccaggcagcaggtggtgaccaaggtcaagccaccacagctgaagcccaagttgaagccttgctgaacaactacatagaaagaatcaaccagggtcaagaagatgactctagcctctacgctgcttttgttagtgacgtttccgctatcgaaggggcggatgtaagtcaagctgtcgaccgattagctcaagcagtcgctaataaagtggctcaggctgaccaagtccaggaaggccaaactgaacaaggccaaggtcaagcacagtctggtcaagctcctgcagagtcccacactggtgaaggtcaagagggaactgaccaggctgaagagactgaaccgagccagggtcaagcaagtcctgaccaagctccacaaggccaagaagaggccgaccaagcggatgttgcaggtcaaagccaagcaccagatcaagactcgggtgcccaaccacaagtggtgccttttgctgctcagcctcaagctgaccaagtcaaagacgctgacctggatgcccacctgggtgaacctcgccacgtcgatgggaccccaatggaagagcgccaggttgacattgaactaaaccaagcctatgtccaagatgcccttgaacaacgtatccgggacttcagacgccaagcttatgatgttaacctcccatttagatatgaagactatgaccgaccagctggagctaacccaaataccaaccgcctccaaacagcagcaagagaagctggtttttacgatagagaatcctatgccaatggtttccagtggagtgaccgcctagaagactacgctatcccaacgggcgactgaactcctaaccactggctaccactcaggcaactacagccactaccgacctgacagacacgacaataaaacagctggtagacgggttcaacaccagtacattagtgaaaacggtgagactacccactcagcaccagaaaacatccacgctttacgtgatgatgatatccacactgcctttgattactgggcaccaagagaaattgagaacttgagacgggtagacggtagcatgaaatacggtggtcaatccgttacaactacccacatccactccattcttaacccagtccacaccatctttggcggggccagtgttcagttagcagaaggatctggggttaatgctgaccgggctaacgtccttattgccagcaagtgggatgaaccggccaatggtcacgaggactccggttattcccgccaaggaacctaccgggtaaccgtccaaaccaagcaaggcggtccaaaattacctggtgaggttgacccgaatgcccaagccccagttgaagacaaaggggtggcataccaaccaattccattccaaacccaagaaaacttcaaccctgacctagctgttggtgctgttgaaacagtccaagaaggtcaagagggctggactgctaacggtgtgactgttaaagaagcccttgacgaagttgttgaatacggcccagaagaaaaaactgaagactttgaaacaaaatatgaagtcaactttgaattggacctaggcgaaagcaaggttcgccaagaaggccaaagaggtgtggcccactataacccactcactggtgacttggtgaaagtccttagcgaaaaacaagacaaaattgttgaagttggggcttacgaaggtgaagttccttacgacaccgtccgtagaccagtcgttggcctagaccaagaacgggtggttcagattgggtctgacggtacagcttactttgacagtgaaggtaacttgtacgaaaccgaccgcaatacagctcctcaagatgaaatcgttgaatacccagctgaagcccgtccagtcccttatgctaaaaaccgtattcctagccgggaccttcaattaggggaaagcaaggttatccaagctggtcaacctggcctagcttactacgatgaagaaggcaacaagctggatgtaccagaaaatgtggatccaaaaactgaaattattgcatacggctaccaagttcaggaatttaaaccaggccaagaagaaaatccaggccaaagccgaactgcaaatcctgccccagcaggcaacagccgatcagcaaatccaacaccaactggccaaagccgagctgccaaccctgaaccagcaggcaacagccggtcaacaaatccaacaccagctggccaaagccgaactgcaaatcctgccccagcaggcaacagccggtcagcaaatccagaaccagccggccaaagcagaactgcaaaccctgcaccaaccggtcaaagtcgcacagctaaacctgaaccaagtcttaaagacctagctgacagtttaaaagctaaccgggctaaacaagctgaccttgctaacaaagtagctgaagccaaccaagctcaagatgatgcagataaagctccagtaaaagtggaaaaaccatcaaaagctggaaacactgacttggaaaacaaagctgcagataagcaagcatctgctgaaaaagttaaggtcgaaaaaccagaagctaacaacaatgcagagtttcctgaattggctgaactcctccaagcccttcacaaaggccaaatcgaacaagccttgaaaggctatgaccgggctaaagtccaggcttggcttcaagcccaggaagaagagagcggtcagttgaacaaggaagaaattgctggcttgcttcaagctttaagcgaagatcaagaaggacaggatggcgaccaggctgacccagctgaagaccaggccgatgatacaagtgaccttgaccaagtcttagcggatgcagaagacctacttgctgaatttaaccagctagtggaggctgaaaaagcccaaattctcaaagctcttcaagcaagtcaagatcctgctaaattggatgccttgattgaagcggcttacgaattgaacttgactcgagctaatgctagccaagtaaccccaacaagcagccaagctgaatcaagccaagaaaacagtcaagcagaacaagatcaagaaaaagccgaatcaagtaaagctaaacgagaacaaactgaatcacctgaccaaggtcaaaaattaccagctaccgcaaccagtgcttgggcactcggcctactcggtgtcaccacccttgtttcaggactcggcattaaaaaattcaaagactaaagctatacagctagaagtctagtccaagctgagtaaagagccagcatgcaagtcatgctggctcttttcgtctaattgttctggcagcgacatcattttcaaactgaatgtaatgttcttgaattggatttttctcaatcttgaccgggacgccagagctagctatcttaccaagcaacacctttcctttgaccactcgaagataaaaaaaaccgaccaggcctggtcggtttatctttatattatccaactgtttatttcaaatactgcttggcgtattcatactggcgcttgaccatttgcagccaatgcttgttgtagccgtcccctttggcatggagggggttggcaaacctgcccgccttgatcaaggtcttgacctcagctcttagcttgtcatcatggatggcccgcttgaggacaaagccagggacgaccgagtagagaaagtcctcttgcaagtagtggcggtgcttgggtttatgataaattaagtcgtctactaggtactgggccatggcatggttgttgtagcagatataagaggaggaccggccttggcggatgttcacttcaaagactttgaacttgccgtctctttggtcatacttgatgtcaaagttggcaaatccggtgtagccaattttttctaaaaagttagctaatttttccatcaggggcttgttgtagcgggtgaccagggcggtgtaggccccaaccaagtgggacttgcgttcttggaggaggacttgggccagggtaatgagttggccctggccatcttggctgccgtaatatacagcatcccacatctggctgtcatcaccaggaatgtattcctggataatcaagtcagactggtagtcagcagcttgcacttcatctaggacagcttggagctggtcttggttgccgatgaagtggagcttgttgacctcgtgtaagccagccatttgataggctaccacatcgctgggtttgaccacgacagggaaggtgaagtccaggtctacatcagctggttgggcacagttgtagaagaccgttttgggaatgtcgattccttcctgggcacagtattcatagaaggctttcttataaaacaattggtcccggacttgagggctaggaatgttcaaaagatagtattgacgtaaaaaatcctggtggtcgatcatcaggttgatgtagatatcattggttccgattaaaatcagctggtcatagagtttgctatagtggtcagcaatgatttgcagggtttcttcaaagcgtttggggtcggtgagttgcttgtcgtagtggatggtttggataatgtcgctttccatggtaaaaaacatgtggagcttgccgactaaaacaggcttgattccgtaacgcttataaaaggaagttgccatagtataggcgtttaagtcagtaccgataataatgggcaaaaaagatgggtggtcttctcgaatcataattttctcctttacatttacaagcttggtccctctaaccggtgcttgctagacctgctacaagactgggtaaagttctgttctgaccaattttgcggtagttgcagaaagaacgtccacttaagtcaaaaaggataggccaaaagcccaagcaagtgcatggtgaggggcctggcacaagccagtcagtttacatgacctggccagtatggtaagataatggctgataatcacagcccggcactggtattattctggtgtgaagttcaattctacatcggtcaccaggtcgcctgacttcttgtttcatttttaatcttatctgaaacaaatgatttttcaactcttttttatcttactttaaaagttttagttaggagccttagcttgtaccgtatctctatgaaagacttgcatgccctattagctagcaagcagcagttgaaagaagtggtcggtcccgaccaagtttggcattacaatttgcctcaaggggaattggccgaccaagtttttgacaaactttcctacaattcccaaactgcctcctcagacacccttttcttttgcaagggtgcttcctttaaaagagactacctagcccaggcggttgaccagggtgtccaagtctatatttccgaaaaattgtatcaaggcctggatgcttatgccatcattgtccgtgacatccgccagaccatggccctagtcgctaaggctttttaccaggctccagatgaaaaattgaccctgattggcattaccgggaccaagggcaagacaaccacaagttacctcctcaaatccatcctggaccaggaccaagccggtaagacagctattatttcaaccttggggatttccttagacggccagacccaagaagaagcctccctgaccactcctgaagccttggacctctaccagatgattgcccgggcccaagaccaggggatggaccaattgattatggaagtatctagccaagcctacaagatggaccgggtctatggactgactttcgactttggagccttcttaaatatttcgcctgaccatatcggccctaatgagcacccagatatggaagattacttctattgtaaaagtcgtttggttaaacattccaagttggccttgctcaacgctggacttgaccagctagactacttaaaagaccttagccaaaaaaatggcggtcaggtccaagtttacggccaagatcccaagacttgtgactactattttgaggttaacaaccaggacagccgccgctttgccattaaaagccaaagccctgatgacttggccattgatggggattaccaatttgaaatgttgggtgattttaacaaggagaatgccctttgtgccgctcttatagcggggcatttagaagttgggcaagaggccatttaccaaggaatagcccaggcccaagtgccaggacggatgcagcattatacttatggcaacaatcacatctatgtagactttgcccacaattacatcagcttgaaaaatctttttgattttgcccaagaccaacacccggaccacaccatggtggttgtcttgggggcccctggcaacaagggggtgtctcgccgcaaggatatgggatacttgctgtcccaataccaaggggaagttatcttgaccgaagatgaccccaattttgaagacgttcaagctatctgccaagaaattgcccaatacattgatggccccatccaggtgacctttaatgataaccggataaatgccatccaagacctcctagagtccttaaccccagaaagtcaaaaagtcatcctgcttgcaggcaaggggtccgaccagtacatgctgcggcggggtgtgaaggaagattatgcgggagaccacaaattggttgaagcatttttaaaccagcaaaagacttcttctcatgagaagcttgagggttaggtctttgagagcttatccaacctgggggtccaaaccggttttagacccggtccctgattagccggtccattatgaagcaagtatccagtaaaattattatctgaaagtgggaaaatccatgcaaaaccgtagccgtaccacccgtttaaccgtcagtgctttattgattgcgattgggattttaattccaatcgttatgccctttaagattgttattgagccggcttcctttaccttggccagccacctacccatctttatcgccatgtttatttcacccagcatgggggcagttgtctctatctttacagcggttggctttctcctagctggttttccgatcgtggtcaccttgcgggccttcagccacattatttttgccgtcatcgggggccacttgatccggggccggcagaacgacatcctctcaagcccctggaaaagccaagccttttccgtcttcctcgccttgatccacgccctatctgaaatggccgtggtctccctcttcttctttggtgttgtcccaggggtggaataccaggaaggttttttctacacagtattcttgcttattggggtctcaactttcatccacagcctgatggactttattttggcccaaattgtttggaatgtcattctcaaacggaccacttggctatctgagattacggctaaataaaaaagcttggccttgccaggcttttttattttggggagttgagacttgacaattaatatatattagtttacacttgtaaacagaaacggattaaaactgagctagggcaaactagcttttcttttaagaggcttgtctacaattgtaatcgacacatcaagtcattcagttctagttatcgacttgtcctctatgctgtcggctacaatcttaaagaggggaaaatccctgcctaccaaacaatcagtgggctatcttgtgagccatcgtttacaaatgtaactcaaccgccagtttaatattcctaaacggttttagtgatcctaaagtgaaaataccatcaaaaaggaggtctttggatgagagcaagtattagtcagtctgagtgggaagtgatgcgggtggcctgggcccagagtcgggtgaccaaccgcgaaatttacgaagtcttagctgataagaccgagtggaagatgtccacggttaaaaccctggttagacgcttgtgcgacaagggctttctcagaccggaaaaagagtccagggaatatacctaccgccccctcatttcgcagaaccaggccttggctgtagctggccaggacatgttcaagcagatttgcaacaaggaggtgggggctgtcttgattgattttatcagagaagccccaatgagccaggctgacttagaccagctccaagccctggtcagtgagaagaaaaaaaccgccccaaaagaagtaacctgcaactgccaccaaggtcagtgccagtgccaagttggacatggaacctgctaaccaaaccaggacctgtcctttttgcctagcgaatacaggcatcaaagtaaaactgagagacttaaacagtaaactcaggtcaaggaaaggaattgagaaccatggctgaaacatttacagtagaaggcatgacctgtgccgcctgtgcccagacggtagagagtgcggccgctaaaactgctggtgttgaggaagcctccgtcaacctagccagtgaaaaactccaagttgaaaccagtgaaaattttaaggaagaagacctccgccaggctgttaagaaggcaggctacgccctagccttggctgagccggtccaaaaagtttttgccatctcggacatgacttgtgcctcttgtgcccagaccatcgaagagactgtctccaagctagaaggagccaaggaagtttcggttaacctggccagcgaaaaaatgaccgtgacctatgaccccagcaaactatcaatccgccagattgaagatgctgtggaccaggccggctattcggcccggctaaaagaagaccggtcaagtcaaagtgaccaagttggcaaagaccagcccttatccaaaaaagacagctacaagaaaaaaaccattatcggctttgcctttatggtccccttaatggtcattgccatgggacccatgctgggcatgcccttacccgacttcctggaccccatgaccagccccttgaactttgccctcttgcaactagccctgaccatcccggtggttttaacaggtttgccttactaccggcaaggttttaagaccctcttggctggccatcccaatatgaatgccctgattgccttggggactgcagccgccttcctttattcgttaggggcgactggggccattgctgtgacaggccggtctgacctagccatgatgctctactacgaaaccactgccatgattttaaccctccactccctaggcaagtatttggaagagcgagctaaagggcagatgtcccaagcagttgaaagcctgctcaacctagctgccaagactgcccggattgtccatgacggtcaggaggaagaagttgccattgaagaagtagtgccaggggatgtcatccgggtcaagccgggcgagaaaatgccggtggatggtcggattatttccggccggacctcagtggatgagtccatgttaactggggaaagcttaccggttgaaaaggacttagaagatgaagtgatcggggccacccttaatcaaaacgggaccattgactaccgggccaccaaggtgggggacgataccactttggctcagattatcgacctggtagatcaagcccaggcatcgaaagcccccattgcccaaacggctgacaaggtaacccagtactttgtcccggctgttatcggcctggccctcttgtcctccctggcttggttggtctttggccagtccttcctttttgccctcaccatcgccatctccgtcttagtgattgcctgcccatgtgccttgggtctagctacaccaactgccattatggtagcaaccggaaaaggagcccagcatggggtcttaattaagtcaggccaggccttggaaggcttgcaagcaattgacaccatggtctttgacaagactgggacccttaccaaggggcaacccgaatgtactgacattatttccttgccaggccatgactatgatgaagcagacctcctctacctggcagctagtgccgaaaaagggtctgaacacgccttggctcaggctattttagacaaggctgaagcagaaggtgttcaggtcggccagtccagtgacttccaagcccaatcaggtatggggatttcggcccaggttgacggccaaaccatcttttttggtaaccagaaattgatggaccaagaaggaatagacttggatgaaagcattaaagaccaagtaaatgacttggctgaccaaggcaagacccctatgtttttagctgatgacagccagatcctagctattttcgctgtggcagacctcttgaaagattcagctaaagaggccatccaaagcattagagaccaggggattgaagtcatgatgctgaccggtgacaatgaaaaaactgcccaagcactagccagccaagctggcattgacggggtggtagctgatgtcctgcctcaagataagtcagaccagatagccaagttaaaagaccaaggcaagtcagtggccatggttggcgacggcattaatgatgccccagccttggcccaagcagatgttggtctggcaattgggactgggactgatgtagccgtcgattcggctgatgtggttctcatgcgggatgacttaaaagaagtgacgacagccgttgaactctcccgggccagcttgaaaaacatcaagcaaaaccttttctgggccttcttatacaacagcctaggtatcccggtagccatgggggttctcttcctctttggcgggccactcttgagtcccgaaattgcagccttggccatgagcctgtcttctgtttcggtcttactcaatgcatcccggcttaaaggctttaaacccagccacgcccaggtcagcccaagttagcttaggccctggtgtaagttccaaacccagctgaggtcaaattaacttagaacttgccggaaaatacctagggtcaagttattgtttctgactagggtcatttttcctagacttggaccaaggtaaacttcaaagggaattcagccgaatgacccttcccataccaaaaggaggtgagtgtgatggataaaagctttaaagtgtctggcatgtcctgccaaaattgtgccaagacagtggaaaaacacctcaaagactccgaccaggttcttgaggccaaggtcgatttagaaagtcaaacagcccgggttcaatctgaccttgacttaggcccagatgacttgaacgtcgccttggaagacaccccctaccgtattgaaaaaaactgagcatataaattgaaaaaaagacagaaaactagtaccattttaggtaaaatggtactagtttttatttatgaaggaaggtggcaaaatggttaaagcgtacctaccctttcgctttcgctacacccctattgtacaaaccgtgctcattaagtttacaaaagatcctgactacctctaccattcccttgaacttcaggtttttgaccaaaatggcaaacgctatgcccaagtcttggcttggcgaccagatggttacaaggatgtctaccaagaagccggtctctccttggaccagggtgaattaaacatggtcgttggtggtagaggggtaggagatttccaagaaacggctagctttgggccgactacttttgaagaaacagatggccaagttcggatcaaattctcttttactgataagaatagacgggagatagtcttttctgtcgtggaagacttggaagatggtgtccacctgtcctggttgccttccatcggggcccagtgggacgacccaacttcagttccccttttatttctttacgagtttgactttgtcaaaaagaatggcagccaactagacttcactattgacggggtggaccatcaagtggacccctatgcctttcccaagggtttccagtcccggttagatatcgagtactccttagaatcagtcatgaccaactttaatgaagctagggaagaagagcttttgcaactagacttggatgagtctggcaaggccagccggggggaccaagactaccactaccaaatcgcaggggataaaccccacctggaaaaaatggtcatgaaggagggccaccaccctgttgcggttgaatttgaacctgccttcccagattacaccgaaattgaggagagtgtgcctcaatttggtcaattttccattaaaccctcccaagaactaggggacttaacaggcaagtataatgtagtcaagcaggaaaataaagtcattatcaacctggctttttcagaaggttggaaccccaaccaaggggagacttacttcgacctgatccgccagcggacgaccacccgtcctaacggattggtataagtccctccaatgtacagagattattgatctagatgatatgtcggtttcggtcaagtggaaaaaggttgaccccgaccgccaccaacaattgtaaagaattcaaaagaaggctggaaacggccttctttttcattggctaaagcagactagggtaaaaatagtacaaaaaaggagtcagccccaagggtctggttatgataaaataaaatgagaagtttgtaacaaaaacctaacaggtcttctcttataagggtcagtttggttacattttcttcatatttgtaaaaaaagataatataattttacatttgccaagaaacttgttaccctatatttgtcacaaaatcgattgaaggaatgggcggttactacatggaatgtgcagtaacctatttatttgccttgtttttgtatatgaggaggacagatagttgggaaatgaaacgaagatagatgtcaaaggtttaactaagatctttggcaagaaaagccaaatagacaaggcggctgacctacttgaccaaggaaagaaaaaagatgaaatccttgaaaagacaggagctactgttggggttagccgagcagatctcaatatcaaaaaaggtgaaatttttgtcatcatgggcttgtccgggtccgggaagtcgaccttggttcggatgttgaaccggttgattgaaccaactgaaggacaggttttaattgatgaccagaatattatggacatggacgatgaagccttgcgggatatccgccgggaaaaaatttccatggtcttccaaaatttcggcctcttcccccaccgaaccatcttagaaaacaccgaatatggtttggaagttcaagggattggcaaggaagagcgccaagagaaagctgagcgtgccttagacaatgctggtcttttgtcttacaaggaccaaaaaccgggtcaattgtctggtgggatgcagcagcgggttggcttagcccgagccttggccaatgatcctgagatcctactcatggacgaagccttttctgccttagaccccttgatccgccgagacatgcaagacgaattgattgaaatgcaagaagctctacaaaaaaccatcgtcttcattacccacgacttaaatgagtcgcttcgactaggggaccggattgccattatgaaagatggggaagtcgttcaagtggggactggtgaggaaatcttaaccaacccagccaatgactatgtcaaacgctttgttaaagatgtggaccggtctaagattattacggccgaaaacatcatgcagcggtcagctaacttgaacattgcccacgacggtcctcgtgtggctaagcaacggatggaagacgagaacctcagcaatatgctggttatcgacaaggaaagaaaacttcaaggttacgttacagatgatgatgtagtgaaagccattcgcgatggcttgaaattggaagatatcttgcggaaagatattccaactgtttccaaagataagctgatgaatgagctttacgatattattagcgatatccaaacaccaattgccgtgaccgacgacaacaacaaattgctgggcattatcatccgtaaatatatcttggatgccctagctcagcaaaatgcagttgttgaagaggatgaccctcaagcagacgataaccaagcggaggtgaaagacaatggataataccttgtttattgacttaattccagagataccttttactcaatggtttgccgacatcatttcttggttaaccgacaacttatcagccttctttaaccttataagtgatggggctgagtggctcatggatgccatgacagccatcttgctgattattcccccagaaatctttatcatcttaattggggtcttggcctactttgcagctaagaaaaccttctccctgccaactttttccgttgtagcacttttttacatctacaaccaaggtttgtgggaagaattgatgtttacaaccacccttgtcatcctatccagcttgatatccattgtgattgggataccagttgggatctggatgtccaagagccaaacagtgaacaatgtggttcagcccattttggactttatgcagaccatgccggccttcgtttacttgattccggcagtggccttcttcggaattgggatggtgccaggggtcttctcctctgttatctacgctgcaccacctgttatccgctttaccaacttggggatccgggaagttgacgatgagatgattgaagctgcagaatcctttgggtcaacctcccgccagcgtctatttaaagttgagttacctttagctaaatctacaatcatggctggtattaaccagactgttatgttagccttgtccatggtcgtcatcgcttcaatgatcggggcaccaggcttaggtgaccaagtcgtccgagccctccaacaagctcgttcaggcccaggtttcgtagccggctttgcccttgttggtctagctattgtgatggaccggatcttacaaggctttggccaggaccaagactagtttttgaaccataagtaacgatcatgtttaaataaaaaatacagtctaaattttagaaggagcgtattcatttatgaacttgaagaaattcggactagctgctctttcagcatctgcccttttcttgactgcttgcggtcaagaagacggtgcggccgatgtggaaagtgtcgtcgacggtgaggaaattgaattggcttacgttgattgggacagtgagattgcgtccacccacgttattggcgaagttctagaaagcttgggctatgacgtaaccctcaccagtttagacaatgctgtcatgtggcagtccgttgccaatggagatgctgatgccatggtttcagcttggttacctcacactcacggggaccaagaagctgaatatggcgaccaaatggaccacgtagggaccaacctagaaggggccaaaattggtttgggtgtcccaacttacatggaagtggactccattgctgacttgaccgatgaagctgaacaaaccatcactggtatcgaagccggtgctggggttgtccaatcagctgaacaagcccttgaagactacgacaacttgagtgactggactgttgctacttcttcttctggtgctatggtgactgaactagaaacagccatcaacaatgaagaagacattgtagtcactgcttggtcaccgcactggaaattccaaaccttcgaccttaaatatctagatgacccagaagaatcatttggtggcgatgaaaccatcgaaacttacgccagagaaggcctagaagaagatatgccagaagcatactctgtcttagaaaacttctactgggagctagatgaaatggaagaagttatgctgaatatttctgaaggggcagaaccagaagacgcagcggctcaatgggttgaagaaaaccaagaccgtgtcagcgaatggactgccaatgtttcaagcgaaagtcaagaccaagatgaccaagctgaagatgatcaagcggatgaccaagctgacgacggcacagaagatgatgctgcctaagccagcctagcttgataccttgagttaggtcaggtgaaatagaaataaagcacaagttagggactaacttgtgttttatttttttaaggaataagaaaggagacgtgttcggtgaaaggcaaaatactaaaaactttagcaagtacaggaattttaacagcaggtttggtccttgctggatgtgcagatgaccagtctgaggaagtgaccgagactctagtcgatggggatgaaattgagctcacctatgttaactgggatacggagctggcttccacccacgttgtcggccaagtcttagaagatgtgggttatgatgttaccttaaccagtgtggagagtccgattatgtggcaatccattgcttctggcgagtctgacgccatggtagcgggctggttgccttatacccacgccggtgagtttgagcagtatggcgacgatattgtcagcctgggaattaactatgaagatgccttaattggcctcgttgtccccgaatatatggaaggcttggactccatcgaagacttggaagaccaaattgaggacaagaccatagtggggattgaacggggtgccggtaccgttgaagcagctgagcgggccctagaagactatggcaaggaagattgggaagtcatcgcctcttcctctggtgccatggtgaccgaattgcgccaggccattaacaatgaagaagacattattgtcactggctggaccccccactggaagtttattgaatttgacctaaaaatgttggacgaccctaaaaacagcttcggggagtctgaatatattgaaacctttgcccgggaaggctttaccgaagaccacccagttgctgctaccatcctcggcaacttctactgggagcaagaagagtttgaatccgttatgctcgacatcaatgaaggagtcgaagaagaccaagcggctaagaactttatccaagataatcctgaactcgtggaatcttggctagaaggtgcagaagaagcagccgaaaccggtcaagctgtcggggtgagcgaagaaaaagaccaaggtagccaaggtcaaggggacttgccgacccctggtgaagatggagaagaaggcgacccggaagatgacccagaagctgaccaagacggtgaagaagctgatgaccaagaagcagcttaaaccagttgagtaaggcaagagaacaataaagcacaggctagggtctagcttgtgctttatttatcggaaaaaggggtctatcctaggcttttgaattctctgccccgtatggtccgttttgaaaaaaagaggtaacacgaaagcctccgcctccgttatctctagtgtaaggagtcatgacacttacactagaaacaaggaggaatgtacgatggcaaaaacatggttagaaaacaaactagacatttacttggaagatgaagagaatgacaagaccatccgcaaggggtttaacaatatcgtggaagaagccagcgaccagcaagttagtgacttcgcaaacgcggtggccagcctctaccactttgacaagtcccatgccgttttaagccagtcctataccatagactaagtcggccaaatccttatccccatgccagacctagtttttgaataggagtagaaggaaagcaaagaaagaggtaggaccatggaaaaacgactcgaactcttgtttatcaatagcctgggtaaaaacactagcctgacaatttctgaccctaaggcaggcttgaccccagaagacattaaagcagccatggaccagctagttcaagctggcctggttgaagtggaaggtgtccaacgttaccaagctgttcgcggggcgcgttatgtgacccggcaggtggacgagattttcacccaagaaccaggagaaaattaagccaataagctagacctagcccacccctttggattcaaggggtgggcttttttgactagtggggtgggaataatcgccttgacccaagttaagtccaattatttacaggggatagaaagttcgctataataggtaggaagctgagccttacagaccaggctgggaaaatcctggttcagtggcaaggactcgattgataagaaatgaataatgaactggtgaaggactgaaaggaaggttggagtcatgaagtggttgagtcggatcttgattgttgttgggataggctttctgattgcctttggctacacgatttatgaccatgctaactcgacatcggttaccctagaagaagcccaggtggccctggaagaaagccgggcccaggctgctgaagctggggacggggaccaggatggccaagatggggcgagtgacatcgatatccaaaactaccagcctgaagctggggaggcttttggggtcttagatattcccaaactcgaccggagcattggcattgtagccggaacggatgcagactctcttaagaagggggtaggtcacgttgagaatacagtcttccctggccaaggcgaacaaattgtcctctctggccaccgggataccgtcttccgggactttggcgaattagaaattggcgacaattttatcgttcaaatgccttacggggactatgaatatgagattcaggactatgaaattgtcgaccgggatgatacctccgtcatccggcctatgggggaagaagtcttagtggtttcaacctgctacccctttgaattttacggttttgcccctgaccgctttgttttctattgttaccccgttgaataaatcatatatcttaagccagctggtcaagacgcaagtgttttgcccggcttgttttctttttcgactctgctaggaggaatggatttgaccaaactagcgattagcctggttcgaggctaccaaaaatatatctcccccctcttccccccttcttgccgctatcaacctacctgcagtcagtacaccatccaagctattgaaaagcatgggaccttgaagggggctgtcatgggattggcccggatcatccgctgtaacccctttgtccaaggggggtatgatgaggttccggattatttcacccttagacggaatccagacagccaggcccaatatgaagcggatcaaagcttgaccagggaggacttaatcgacctcctcttggctgactaccaaaaggacctggtttataatgaccagggcttagaagcaagcttggcccaaaaaatagactaccgcaagctagacctgggcctcctagatgaagactatctagacggcatgcgggcctacacagaagacttaggcttaagcccggctaacttcagcctagtccaggtagaaaaggtaaaagaccaagagactcctccaaagggggaccccaccagcttggtcaaccaggctctgggcggtgggtccgcaagctacctcctcttggaagaccaggtgggaatcttagacgggtcaccagactatttggccctagacttggtcctggcctttggggtaagggaagtggatgtccaggacaaatcaagtcgtttattgcactacttacgggtcttagaccaagtccaagtttaagcatttcttaaaggcaagttggtccgaatgtgttaaacattgaagctagcaaggattcggtatagctaaaggaggcggctcttgtgaatattttgatcgcagacgatgaccgggaaatttgtgacttgctggaaatttacatgaaacatgaaagctaccaggtggaaaaagcctacaatggccaggaagccttggataaaatacgcctccaggactttgactgcctgatcctggacgtcatgatgccggtaaaggatggcctagctgtggtcaaggaagtcagggaaaagtccaccctgcctattttgatgctgagtgctaaaacttctgatgttgacaagattaggggactgtccaatggggcagatgactatgtggtcaaaccctttaacccccttgaagtggtagcccgggtcaaaagcctcttgcgccggtcctcctacaaggaaatggatgtcaaggacaagggggaactcaaggtggggcctattgtgatccgcaaggaagagcatgaggtggaaaccttagacggtcagcccatccagctgactgccctggaatttggcatcctgcaccttttagccagcaaccccaacaaggtttttaacgccgacgagattttcgaaaaggtttggcagcaagaaagtttagttccagccaagacagtcatggtccatgtctcccacctccgggacaagctggaaaaagcaaccggtggcgaaaagatcatcaagactgtctggggcgtgggctataagattgaaggagaatagggtaggggctgctatgatacaagcaagaactcttgcctcctttaggcttgtggcaggatgcagaggagctaatgttttttggacctttgatgtttagaaaaggccaggttcaagcccaattttcttgtccattaggtcaagaattagcctagactctagtgattccttctttaatatgacctcttttaaagggaaaagtgatttcgttaaaggaagtggacgatgaagttaacccggtcggaaaaaatcagtttagtcatggaagccttggtaactgcagctattgttattttagtctatttggctacctacaatattttgacctggctggcccgctatctcttgcgctaccatgaaaattcctacctctctcagctcttggctggtctccgggatacaccttactggggcatgaccccggttgttattgtcttcttgaccattgccatggttacctttatctactggcggctcaaaagacggcagcggcaatatgaactggcccatattatagatgaactccaccatattgctgatggggactttagccaccggattgaaaaagcaggctatagttctgaaatgcagcacgtgattgactctatccataccctggttgagtcagccgtggctgctatggaagaggagcggcggattgaacaaaccaaggatgaattgatcaccaatgttagccatgatatccggactcccctgacttctattattggctatattggcctaattgaatcaggggcctataataatgaagaagaatttgaccgctatcttagtgtggcctctaacaaggccaagcaaatgaagcggctggttgatgacctcttcgaatacatcaaggtccgccagccttccactaaactcaacatttcccactttgacatggtccagctagtggaacaactggccatcgattttgagctggacctggaccagcaagagactgacctgaccattgaacccagccaggactccattatgatggacggggatgccgagcaattagtccgtttgatgaacaacctggtctccaatgccttgaagtatggccaagctggtcagaagatcaaaattaccattaaccaagaatatgaccaagtcagactccaagtggccaataacggtagtgacctgccccaagagcgattggatttgatttttgaccgcttttaccgcttggaagagtcccgatcttctgaaattgaagggactggccttggccttcctattagtaaaagtattgcccagcttcaccacggaagtattgaagccaaaagccaggatgggtggaccatctttgaagtagtcctccccctcacttaccaagaaaaccaggaagggagagacggccatgtcaggtcacaagcttaaaaaaaccatcttgaccgggatcctagccctattaatttggtctccaagccaagtctgggcccaagaggatattgatgtccaagctgacagtgcccttttgctggatgcctcgacccggcaaattttatatgaagataatattgatgaggtcaagcccattgcttctttaaccaagatcctggtccagtaccttgtcttggaagaaattgaccaagggaatgtaaactggcaagaccaagttagtatttcgcccttccttgaagacttgagccaggactttgaactggccaatgtccccttgtttgcagaccaaacttattccgtttccgaactcttttatgccctgtctgtttactcagccaatgcagccaccatggccttggcagaatacatggaagggtctgaggaagcctttgtctaccggatgcgggacctagttgcaagctttgggattgaagatgcccatttggttaacaccacgggcttacataattcatttttagctggccggcatatcccaggcagtcaggcagaggacgataacaccatgtcggctaggagcatggccatcattgctagccgcttgctagaagaccatcctgacatcttagactattccagccagtccttctatgaatttgagacaggctatggggtctttgaggtggaaaaccgcaacaagatgctagaaggtctatcccatgaataccctggggttaaggggatgaagactgggaccacggaatcctctggccggagctttattggctattatgatggggaaaatggtgaaagacctcttttagccctggtctttaacgctggcgacctggaccaagagtctgaccgctttaaacgttttgaggaaacagccaaactctttgactatggccgggagtcttggcaggttgagaacttgttagatagtccgtcctgggctgaccagctagagggcctaccagtggctgacggccaagctgaccaggtggatttggaagttgaagcccaagaatcctttgaatttatggccttgcaagatcagcagagtccctaccagttaagcatagacttggatccggcttttacagatggtgagggtttgctccaagccccaattcaagcaggggaccaggtgggggacttggtttttgacctggattctggagtcagctacttggacggcagttcaaagagtcaagtttccttccccctttatgctaaggagtcagttagccgggataacttccttgtccaagcctggcagaacttcattgactggctaagaagtattttttaagattggcaatttttgaaaggcatggtatgataattgcatgtgaatacaacaatcgtagctaagaacaagtcgcttgcaagcttgacttagggagcttgggcttgctgggaaggggtttgacttgtaagtgaattcatcatcagtttaaatacagaagcttgagcctgatttatttcgcttgcccccttacctagccaagtgtaagagggctggaacccttttgaagttgggtcgcaccgaaaacggcagtctttggtccctggaggggcaaggctgtttttatttgcaaaaatacaaggaggactagaccatgttagatatgaaagccatgcgcacgcaaccagaccattataagaaactcttggaaagccgaggagtttcagatgaccaagtcgaccacttgctatcccttgaccaaaaacggcgtgatttaatacagcgttcagaatctttgaagaaagaacggaatgaagtcaccaagcagatctctgagaagaaaggtaagaatgaggatgcccaagaggctattgacaatatgaaaaaagtgggccaagacattaagacggtcgacagtgacctagcccaagtggaagaccagatttttgacctggctagcgggatccccaatattcctcacgagtctgtcccagtaggcccgggcgaagaagacaatgtggaagtgcgtcgttggggcgatgacttaatcccgcaatttgagggtgagcccaaagcccactgggacattgggaccgacctgggtatcttagactttgaacgggcgaccaaggtagcttcatctcgttttgtctactaccgcaagctaggggctagactggagcgggccctctataactttatgctggacaagcatgtggaccaggaaggttatgaggaagtgatccctccttacctagccaacgaccagaccatgtatgggactggccaattccctaaatttaaagaagatgtctaccaggttgacggccaccctcttaccttgattccaacttctgaagtgcctttgaccaacttctaccaggatgaaatccttgaagaagaagacctcccccaatacctaacagccttgaccccaagctaccggtcagaagcagggtctgccggacgggacaccagggggattatccgcctccaccaattcaacaaggtggagatggtcaaattttccaaaccagaagactcttttgatgaattggaaaaaatggtagccaatgctgagggaatcttgcaagatttaaaactgccttaccgggttatcaccctgtcaacaggagacatgggcttttctgccaccaagacctatgacttggaagtttggatcccagcccaaaacacctaccgggagatatcatcatgttccaactgtggtgacttccaagctagaagggctaagattcgctaccgccatgatgagggccaaatcgactatgtccacaccctaaatgggtcaggccttgcagttggtcggactgtggcagctattctagaaaactaccagcagcctgatgggtccgtcaagattcctgatgttctcgtcccttatatgaacaatattaaatacattaaataagttgatgctaaactgcttttttgtgaggccggcaaaagagcagtttttatatttttctttcaacttcttatgtgataggatattgtctagaaaagtgagcgaaaggggagctttcacatgtcagatctaaaagttgcgaatttttcaggcggttgtttctggtgcatggtccgtccctttgaagaagaagacgggattgaatcggttgtctcaggctataccggcggacatgtagccaatccgacttatgaacaagtgtgctctaacacgactggccacactgaagcggttcaaatcacctatgacccagacaaggtttcatacaaggacttggttgaaatttactggcaacaaaccgacccaaccgatgcaggcggtcaatttgccgaccgtggggactcttaccgccccgttatcttttacggtaaccaagaagaaaaagaaattgccgaacagtccaagcaagacttagaaaattctggacgcttcaatgatcctattgtgaccgaaatcaaagaacggtctaccttctatccggcagaagaataccaccaagacttttacaagaaaaatccaacccattacaagatgtaccgcaagggatcaggccggcaagactttattgaagaaaattggcaagactaggatttatgaagtctccgtaaattttagataaagaaaatgtcaaatcgccttgacattttttacactagcctgtattatgaagaagttgtttggaaacaacttgtctagtgagaatagccagaaggaaccacctgtacccatgccgaacacagtcgttaagcttctgagcgccgaggataatgcagggtttccctgtgtgaaagccggaccttgctaggcaaatatggaggtttagctcagttgggagagcatctgccttacaagcagagggtcataggttcaagtcctataacctccactcaagaggggccattagctcagctggcagagcatttgacttttaatcaaagggtcgctggttcgaatccagcatggctcatatcttttaaaagaagaacttgcattttaaggctattgttagtataattgtttcttggatacattaaaaataaaagtcggctcagctccttttctagagtggctgatttgtaatcagtaggttgagagctcaaatttttcagccggcattctattatgcggaagtagttcagtggtagaacatcaccttgccatggtgggggtcgcgggttcgaatcccgtcttccgcttttgaatctttttaatagtgcacaaagtctacaggctttttatgccggggtggcggaattggtagacgcacaggacttaaaatcctgcggatggtttcatccgtgccggttcgactccggccctcggcacttactcatgcactcatagctcaattggatagagtacttgactacgaatcaagcggttagaggttcgactcctcttgggtgcgttattttatgtcttgacaagatttgagacttaaagtatagtggaacatgttctttaaaaatgaccgggaagtagctcagcttggtagagcacttggtttgggaccaaggggtcgcaggttcgaatcctgtcttcccgattacatggcggcgtagctcagctggcgagagcgtacggttcatacccgtgaggtcgtgggttcgatcccctccgccgctatttaccttaaaggacgttggacctttagctcagctggttagagctgtcggctcataaccgaccggtcgcaggttcgagtcctgcaaggtccatcaaatgcgggtgtagtttagtggtaaaaccacagccttccaagctgttgtcgcgagttcgattctcgtcacccgcttgaaggtgctttgaactttaagtcaattaaaaagtggctggtattctttcattaacgggcctgtagctcagctggttagagcgcacccctgataagggtgaggtcggtggttcgagtccactcaggcccattgattttcggtctattttagtgtagattgggaccaatcaaattttcggccccttggtcaagtggttaagacatcgccctttcacggcggtatcacgggttcgaatcccgtaggggtcatcacattatggaggattacccaagtctggctgaagggaacggtcttgaaaaccgtcaggtgtgtcaaagcacgcaagggttcgaatcccttatcctccttattcatattatcgcggggtagagcagttggtagctcgtcgggctcataacccggaggtcgtaggttcgaatccttcccccgcaattccaatttggccctgtagtgtagcggttaacacgcctccctgtcacggaggagatcgccggttcaaatccggtcagggtcgtttaaatggcgcagtagctcagttggtagagcaacggattgaagctccgtgtgtcggcagttcgactctgtcctgcgccattgctattcatggagggatagcgaagtggccaaacgcagcggactgtaaatccgttccttcgggttcgtaggttcaaatccttctccctccatcgctaggggtatagtttaatggtaaaacagcggtctccaaaaccactgatgtgggttcaattcctgctacccctgttacaatgaatattgtaaagctaatggcgaatgtggtgaagtggttaacacatcggtttgtggtaccgacatgcatgggttcgatccccatcattcgccctggtaattgggctatagccaagcggtaaggcaacggtttttggtaccgtcattcctaggttcgaatcctagtagcccagtttcattttggcgcggtcgccaagtggtaaggccgaggtctgcaaaacctctatcgccggttcaaatccggtccgtgcctctttttgcttatgacctgccgatgtggcggaactggcagacgcgctggactcaaaatccagtgcccattgcgggcgtatcggttcgaccccgatcatcggcatatcaagttgcatttttcaacttgataaaatgctaaattcttgttgacaattactcggctggcatgctactatagtacttgtcgctgatttgagacgagaatttaaatgtgaactcttttggagagtttgcggaatagatctttgaaaactgaacaaacaatgataccaagaagtgcaagggtctcaagctttactttagtaaagtgagacaattcaagtacttttgataagtttttaaaaacttatgacaacaatgaaccaagatagaacaggtgttaacctgaactcttttaaaacgagagtttgatcttggctcaggacgaacgctggcggcatgcctaatacatgcaagtcgaacgccaaatcttcctgcttgcaggaagaggcggagtggcgaacgggtgagtaacacgtgaggaacttgcccataagagggggataacacccggaaacgggtgctaataccgcataggttttcccagtgcatgctgggaaaatgaaaggtggctctgctaccgcttatggatagcctcgcggcgcattagctagttggtagggtaaaggcctaccaaggccatgatgcgtagccgacttgagagggtgatcggccacactggaactgagacacggtccagactcctacgggaggcagcagtagggaatcttccacaatgggtgcaagcctgatggagcaatgccgcgtgagtgaagaaggacttcggttcgtaaagctctgttgttggggaagaacacggataggagtcactgcctatcccttgacggtacccaaccagaaagtcacggctaactacgtgccagcagccgcggtaatacgtaggtgacaagcgttgtccggatttattgggcgtaaagcgagcgcaggcggtccggtaagtctgatgtgaaagcccacggctcaaccgtggaacggcattggaaactggcggacttgaatgtagcagaggaaagtggaattccatgtgtagcggtggaatgcgtagatatatggaggaacaccagtggcgaaagcgactttctgggctatgattgacgctgaggctcgaaagcgtggggagcgaacaggattagataccctggtagtccacgccgtaaacgatgagtgctaagtgttggagggtttccgcccttcagtgctggagttaacgcattaagcactccgcctggggattacgaccgcaaggttgaaactcaaaagaattgacggggacccgcacaagcggtggagcatgtggtttaattcgaagcaacgcgaagaaccttaccagctcttgacatcttctgctagcttcagagatgaagcgttcccttcggggacagaatgacaggtggtgcatggttgtcgtcagctcgtgtcgtgagatgttgggttaagtcccgtaacgagcgcaacccttattgttagttgccagcattgagttgggcactctagcaagactgccggtgataaaccggaggaaggcggggatgacgtcaaatcatcatgccccttatgagctgggctacacacgtgctacaatggatggtacaacgagtggcgagaccgcgaggtttagctaatctcccaaagccattctcagttcggattgcaggctgcaactcgcctgcatgaagtcggaatcgctagtaatcgcggatcagaatgccgcggtgaattcgttcccgggtcttgtacacaccgcccgtcacaccacgagagtctgaaacacccgaagccggccgggcaaccctttggagccagccgtcgaaggtgggttggatgattggggtgaagtcgtaacaaggtagccgtatcggaaggtgcggctggatcacctcctttctaaggatcctgccagagggcagggaacttgcattaggtcattgtttgtttagttttgaaggatgtattccttcccttgttctttgaaaactgaatagttgaatcgacatttatcatcaaatgaagacaacaccgagatagcggaatgaacaatcattccacgttgaagagtctattttattgcaaggcaataaacgagaacacaacgctacacatactcacttaacttcggttaagtgaagaagggcgtacggtgaatgccttggcactaggagccgatgaaggacggaacgaacaccgatatgcttcggggagctgtaagtaagctttgatccggagatttccgaatgggggcaacctcccatctttagtcggatgggactaggaaagtgaatccatagctttcttaggggaagacgcggtgaactgaaacatctcagtagctgtaggaagagaaaacaagagtgatttcccaagtagcggcgagcgaacgggaaagaggccaaacagacatgcttgcatgtctgggttgtaggactcaatgtcgggaccggccgtttaaggtgaacaccctgggaagggtggccagagcaggtgatagccctgtaaccgaccgagcggtcggcccatgaggatcctgagtacgacggcacacgtgctatgccgtcggaagccgggaggaccatctcccaagcctaaatactccctagtgaccgatagtgaaccagtaccgtgagggaaaggtgaaaagaaccccgggaggggagtgaaagagcacctgaaaccgtatgcttacaagtagtcagagcccgtttatgggtgatggcgtaccttttgtagaatggaccggcgagtgacgatcgactgcgaggttaagctgaagaagcggagccgaagcgaaagcgagtctgaagagggcgtcgagtaggcggtcgtcgacccgaaaccaggtgacctacccatgtgcagggtgaaggtgcggtgaaacgcactggaggcccgaacccacgtatgctgaaaaatgcggggatgacgtgtgggtagcggtgaaattccaatcgaacctggagatagctggttctctccgaaatagctttagggctagcctcggatggtgcatggtggaggtagagcgactgtttggacgagggccccttatcggggtaccgaatcctgataaactccgaatgccacccatgccagtccgggagtcacactgcgagtgataagatccgtagtggagagggaaacaacccagaccgtcggctaaggtccccaaatccttgttaagtggaaaaggatgtggggctgcttagacaactaggaggttggcttagaagcagccatccttgaaagagtgcgtaatagctcactagtcgagtggccctgcgccgaaaatgtaccggggctaaacaaggtaccgaagccacggatagaatatctatggtaggagagcgttcgatgggcggggaagctggaccgtaaggaccagtggagcgcatcgaagtgagactgccggtatgagtagcgaaagacgggtgagaatcccgtccaccgaatgacgaaggtttcctggggaaggctcgtccacccagggttagtcgggacctaagctgaggccgaatggcgtaagcgatggtcaacaggttgatattcctgtacttctttctttcgtttgactgacggaaggacgcaggaggcaaagagtagcgcgctgctggactagcgcgtccaagctaggagctaggtgaggagtgaaaggcttatcaccgacggtgactagtgatggggagggaagttgagtaccgaaggatcagcgtcacactgccaagaaaaatttctagggagaaagaaaggacccgtaccgcaaaccgacacaggtcgtcgagatgagtattctaaggtgagcgagtgaactctcgttaaggaactcggcaaaatggccccgtaacttcgggagaaggggcgctgacgcaagtcagccgcagtgaataggcccaggcgactgtttaccaaaaacacaggtctctgctaattcgaaagaagacgtataggggctgacacctgcccggtgctggaaggttaagtggacgtgttagcgtaagcgaagcactgaaatgaagccccagtaaacggcggccgtaactataacggtcctaaggtagcgaaattccttgtcgggtaagttccgacccgcacgaaaggtgcaacgatctgggcactgtctcaacgagagactcggtgaaattatagtacctgtgaagatgcaggttacccgcgacaggacggaaagaccccatggagctttactgtagcttgacattgagtgtttgtaccgtttgtacaggataggtaggagccaaggaactctggacgctagtctagagggaggcattggtgggatactaccctaacggtatgacccctctaactcgccaccctaaccgggtgggaagacagtgtcaggtgggcagtttgactggggcggtcgcctcccaaagcgtaacggaggcgcccaaaggttccctcagaatggttggaaatcattcgcagagtgtaaaggcagaagggagcttgactgcgagacagacgagtcgagcagggacgaaagtcgggcttagtgatccggtggttccgcatggaagggccatcgctcaacggataaaagctaccctggggataacaggcttatctcccccaagagttcacatcgacggggaggtttggcacctcgatgtcggctcatcgcatcctggggctgaagtcggtcccaagggttgggctgttcgcccattaaagcggtacgcgagctgggttcagaacgtcgtgagacagttcggtccctatccgtcgcgggcgttggagatttgaagagagctatccttagtacgagaggactgggatggacgcaccgctggtgcaccagttgtcatgcccatggcagagctgggtagctatgtgcgggaaggataagcgctgaaagcatctaagcgtgaagccccctttaagatgagatctcccattccaagaaggaagtaagacccctgagagatgatcaggtcgataggcttgaagtggaagtgtagcgatacatggagcggacaagtactaatcggtcgaggacttaaccacgcaggtgagtaagtgagatttcggtggtgttagtggttcaactagtcagttttgaaggaacaaggcaaaatgtgtggtgatgatggccagaaggacccacctgtttccatgccgaacacagtcgttaagcttctgagcgccgaggataatgcagggtttccctgtgtgaaagccggacgttgccacgcataatagtatagtgaagagaaaccacccaaattgtttgtcaggggacaatcggtttgggtggttttttgcttcgtcgatatttagtgtcggtatgccaatcttagcaacactgcttgacaaagaagctatttttttacaaataaaaaagccagtaaattccttgtaattaaatcaccacattcaattaaaggagaatctacatggcttaattaagatacaaaagaataaagaaatttgaaagctaataataaaattttgatcattattttttactcgacaggaagaaccaagagttttagggtgtaatggccgattgttagtgaaatgctggacgtcttctagcttaaggggatataggctcaatgaattactcatacctactaactaggctaatcaaatttctcattattctactcgtttgatcttagtaaaagatccactaagcgtcattgtttctagatcttttagacttttgtatataaaaaacaagtgaatttccctcacaatatagtcactacaacataagaaaggagaaattcacttgctaaaacttatgtgaccagaaacttgcagctattgcaatcatctataagcaacttttaagggaaagatagctagagaccaactacttttatttaggatctcctatcccctatgaaactcatacagtatacaattcgagtcaacagtaacattaaaagagaatagacttaacttttttgaccaaaatgatatctaaaattactataagtactttaatttagatttcttgattcttggccatctgaatttcggaacatattgcttcatggtttcaaatataaatccccattgtttttcggacaaatttccaactgtaagttccttctttagttgaagtcccttttttaaatgtctaatttgagctttggtaaatataccccctaatgctaaatcgataggtaacttagggtttttcattagataatcggctaaaccccaaaaagttaagtaatctttataagctacaataggtttagtttttcgagttattttgattaatgcggcatcaactcttggttttggcgagaaattcttttttgcaattgttttaacacattgaatatcgaaccacattttccaagcaactacatatgagtttttaacaaaatttgatgtaaatcttttggcagcccctttttctataataataaatccgctttgaaaggggcttgaaggtttattgagaagcattttcattatcggtgttgtaatggcaaatggaatgtttgaaacaacgacatagggctttctgggtaaggataatttcaaaatgtcttgttgaattatttttgtattttgcaattcaagttggtgtaattctcttatatattttttatcgttttcaactgcgagcacccttcctgcctgattacttaaaactttcgtaagtgcccctttaccagctcccaattctaataccaggtcactttttgaaatgtgagcaaggtttacaatatcctttatcaattttttattatgcaacatgtgctgtccgctaaagttaggagaattcccatttctaaattttttgctgtgatacttattttttctttttctctttgtcattattgaaacttcctttctttatttcactagacttggctctgatagcaaaaaagccacagacatcggcgtctgtgacttctagtaaacgaaataaattttattgcgttaggcaaagagaaataatgcagatttcataaaaataaacagcaaaaaacctttataattgaaaaaagcagaattcgttactcataacattgtaaaagaaagtttgactttcaaacattattataaataaacatgttattttaaaatgttaaaaactgagcagatttatcccgtttactctgtaagaattaacagagccttcgaacatattaaattagttgttcaaagtagggataacaaaaattccactcatagttttcaacaatcctccttaggttagttgcatcagatatactaaaaagatagcataataaaaatataatttcaataaaaaagctgatcagcttccctttactaaaagaaaaagctagtaagtcctacccactctaggtaggaaacttactagccatatttttaggctttaaacttagtttaagttatcattgtctttgctttctttgtcaatttggtcgtcagctttttcaagttgacggcgggcaaagtcgcggccaccaagaccaaaggcaagggcaaaagcaattgcaagtgcaccaattaagaagaagaatgcaacgttaacaatgtttgttgcaaagttcaattggtctagaatcataaatgctgctagaccataaacaagtcctttaacgaggctggttgccaagtgacttgaagtagctttgctaattagagaagaaaggaattctccgagtaggaaagcgacaagagccaagataccagctactaatacgcttggaatgtaagcaatgattgcagcaccaacagcgtttagaatggttaagttaagggctgagatggcttcaacaacaaagagtaaaccaacaacaacggcaacaacttgaccagttaatttagcaaggtctaggttcacattgactttactgtttagggcttcagagtatttgtttaaaccagttcctcttaacaagtcagttaagatttggctgacaaatcgagcagctacgaagccaacaccaagtaagatagctgccacaataatgttagggatagctgataagatagtggtgagtagtaaagcaattggttgaccgattgattggatgtttagtgtctcgatagctaccaataagattggaagcaatacgaggatgtaaactaaggttgatagggttttggttagggacaagtttgattcttcagcttgattactgtcgtcactgccaccgtttaagaaacgattcaagtaagaatcaacattggttgcaaccaagaagttgtaagtcaagttacgaacaaatttagcagcaaacacaccaaggatgacaacaacaatagcaccgataatattaggtaggaagtccaaggctgtattaatcatgttagcaatgggttggccaatcgtttccaagccaaaggttgcaaaaatcccaggtaagaagagcacccatacaaggtaataaacaacttggccgagtgcattgacggtttgctggccgtctgccttggtactggcaaatttccagtccaccaatttagcatccaatttcactgctgtaagacctttggtgattgctttcttaaataggaaggcaatcagccaggcaatgagcaagagaatgatgccgcctagtaaggacccgatgactgaaaacagcccggatcccaggctttcaaataacgataaaattccattcattttatccactccttataatttttttaactaccgttttattataaggataataagaatacaaaacaaatgtataaggtcaaaagaaaggatttttacgtaatttatactctattgttacagatctaatcatactccaatgaaaagaggcttgttatagggattatttataagtctagcttgtgaatggtgataaatacttataaaaatcacaggataaaataacatctattatatttattaatctaatagctgtaattaattatttgctaaaacaaagcttataagtgatgagttccagcaagttgaaaatcaatttgaccgaaaatgatgtctgtttttataaatatgccataatatatattgacttaagaatatttatgacatattatataattgtttaatatgtcatattgcaaaggaggaggcaatgaagctaagtgaccggcagaaaaaaattattaacttagttaaagagcatgagccaattactggggaccagatttcagacaagctaggcctgtccaagccgactatccggccagacctttcacttttgacctcagctgagatcttgattgccaaacccaaagtcggctacttatacaaccaacattatgttactccctttatcatcagtgatatggcccagcgtccggtagaagaagtcatgaaggttcccatcattgtggataaggaaactcctattattgaggctatcaaccgagttttcctagaagatgcaggttctctctatgtgacagataacagccagctagtggggattgtctctcgcaaggacctcctgaaagcggccttgatggggtcagatgtccagcagttgactgtgagttttgtcatgagccgggcacccaatttggtcacggttaaccacactgattccttggcagctgcttgtaaaaaattggtcctccataaggtcaatagtctgcccgttttggagtacgaccaagagactggccaggaaaaaattgtcggtaaactgtccaagacggttataaccaatgtcttttactcgatattagaaggagagcaataaggaggtagcatggtgagtgaattatccatatatgtcttatcggattcaatcggggacacggcccagcaagtggtccggtccattaccgctcaatttccccaagttaacgttaaattgcggcgtttttccaatgtcctaaccgaaaaagccattgaccagatttttaagttgatggacccggctaaaagtaacctagtcttttacacttttgtcgaagagagcctagcagactatatgaaggttcaactagatcaagttggcattaggggcattgatatcattagccctggcctccaggcgatagagcttttaacaggccaagagccagataaggaggctggccggattcggaagacggatgatgagtatttcgaccggatcaaggccattgaatttgctgtccgctatgacgatggccaggaacctcatggtgttttaaaggctgatttgaccttgattggggtttctcgtacttccaagacccccttgtccatgtacttggccaacaagggttacaaggtggccaacatcccccttttcccagagaataaaccgcccaaggagctcttccaagtttcgccttcaaaggtagtgggcttgaccaatagtgtcaactacctgaaccaggttcggaaggagcggttgaagtcttatggcatgtccacccagtcccggtatgtggacaagaagcgaattttagaagaactccagtacggggaagaaatcatgaagcaaatcggttgtttaaagataaatgttgaaagtaaggccattgaagaaaccgctgccgagatcctccaatacttagaaggactccagcaaaaggataaaaagtaaagaaaaaggagtttaatatgcagttagtttataactttaaagaaggtaaccgtgacatgaaagcccttttaggtgggaagggggctaacctagctgagatgaccagccttggcttgaatgtcccaccgggctttaccctaactactgaagcttgccagcgttacaaccaggacccagaatctggcttgtggaaggaattaaaggacggggttttagaagaagttaaaaagctggaagcggaaacaggaaaaggctttggtgatgagacccatcccctcctcttttcagtccggtccggggcggctgaatccatgccaggtatgatggatacagttttaaatttaggcttgaatgaccaatcagtggtagggctggctaagtcgactgaaaatgaccgctttgcctacgacagttaccgccgttttattcaaatgtttgctgatgttgtcaagggcgtccccctagctcaatttgagtacctcttagaagaccgcaaagaaagcaagggggtagaagaagatactgacttagatgcccaagatatggtccagcttgtccaagcttacaaggttcgctaccaagaaacggtaggggaaagcttcccccaagaccccatggaccaattgtttgaggcagtggaagccgtttttgcctcgtggaacaacgaccgggctgttttataccgggaaatcaatgaaattacaggccttttagggacagcggtcaacgttcaaaccatggtatttggcaatatggggcaggagtcgggaactggggtcatgtttacccggaatccagcaaatggccagaaagagcttttcggcgaatacttgatcaatgcccaaggggaagatgtagtagccggtgtccggactccgcaagcgattgccagtttaaatgacgatatgccagacctctaccaagagttagagactgtggctcaaaagttggaaagtcattacttagacatgcaagatattgaattcaccattgaaaacagaaacttgtacctcctccaaacccggactggtaagcggaccgctcaggctgccatcaagattgccaatgacctcttcctggagggccttatcacggccgaagacagtgttaccaagctcaccagccagcaactggagacccttatgcacccccgctttgacccagatgccctagaccaagcagacaaaattggccagggcctagctgcctcaccaggagcagcagttggccgggtttgcttttcggttgaggcagttgaaagcaccgtccaggcaggggattctgctattttagtccgccgggaaacctcgcctgaagatttggcaggtatggtcaaggcggctggtgttttaacctctagaggagggatgacctcccacgctgcagttgttgcccgggggatgggtaagtgctgtgtggccggttgttcagatataaaagtggatagcgaccacgggaccttcacctaccagggggggcaagtccaagaaggggactatatttccatcgatggctccactggttccgtctacctgggccaagttgccatgagtggggccttgatggatgaccagtatgatgcttttatggaccgagttaacgatgctaaaagaatggcagtccgcaccaatgccgatacaccaaaagatgttcaatccgctttagactttggggcagaaggaatcggcctagtccggactgagcacatgttctttggtcaaggtcgaattagtgaagtgcggaagatgatcctggccaagtcaagagaagaccggcaagtttatgtagaccgcctctaccaattccagaaagaggactttgtcagcatctaccaggtaacccagtccctacccgttactgtccgtttactagacccacccctccacgaatttttaccccatgaagaccaggctatccaggcaatcgctcaggatatggatttaagccgagaagaagtggccaagcggatcgaggtcttacaagaagtcaaccccatgctaggccaccggggcgttcggctgggaattacctatcctgaagtcactgccatgcaagtttcggccatcatcgatgcggccattgaagtcaagcaagacatgggctatgatattaagcctgaaattatggtgcctttggtaggtcaaatccaagagttcaaacaggttaaagaccaaattgaagtcctggtccaagaccggttggaagaggctggggtcgacctggactacagtattggaactatgattgaaattccacgggcttgcttgatagctgaccaattggcccaggaagctgacttctttagctttgggaccaatgacttaacccagatgactttcggttattcccgggatgacgccggaagttttatcccaacttatatcgaaaatgggattatggaagaagatcccttcaaaactattgaccaagaaggggttggggctatggttaaacttgcggtcgacaaagctcggtccgttaagccagacattaagttaggtatttgcggagaacatgggggggatgccaaatccatccacttctttgattccttaggcttagactatgtatcttgctcaccctaccgggttccaattgcccgtttagcagcagcccaggccagtcaagagtagaaaattcataattagtagttcaagtccagtcggttcaaccggctggacttttttgggttcttcattaataggccagctttttataaaaccacattagttattagagcattatatccgattttttcaaacaacaagctttatatgagaattctgaatttctttaacaagcttaaagacaaggctaagggaggcaagatggctaaatgttcgttaattaaggaaaatgattaaaataaaaagcataacatttggcttttgtggttgaaaaacggataattaatggtagtataaatgtataattcgtaattaggggtggaaaacgtgtatttacttaatttaaatgttgtctacttagaatcagttgttaacccagaagccgaaagagtcaaggaagccttgaaacggcagggggaagaccaagtgaaagatatcaaaattggtcgtagctaccaacttgaactcgaggcagacagtgaggaagcagcccaagcttacgggcatgccttagctgaacgtttattagtcaacaaggccatggaagactatacactttcaattgaggaggcttaagggtgaaagcagctgttattacttatccgggaacaagcgggggccaaactagccaggccttgctcgaaaaattaggctttgaagtagatatcgtcaagtcaagtgaccacttgggccaagacctagacctagttttggttgctgatggcagtgcctatggcggagccgttagacctggtgctattgctagtcttgaccctatcagccaagacattaaagactttgctgaccacggcaaggttgtcatcggcctcggcaatggttttcaaattttgaccgagttagacttattgcccgggtattttatgaaaaaccccaacttgtcctacatcagtaagatggtaaaagtagagaccaagccagactacctagtgacagaccataatccaatcgacctgtttatctctaacaagcaggctagctaccagctcagtgaccaagacttgagtcaacttgaagcaaatgaccaggttttaatgacttaccaagatgacgagacaaattcaagccatgccatagccggtgtcaccaacaaggaaaacaatgtctttggtcttatgccgctattggaccgccaccaggaccaagacatcacttctgacttggggctaactttaacccgagacatcctcaaagagaaaggactggtctaatgaaattacaagctatgactgcccaagaagtaaaagattccaagacttacttggaatggggtttgtctgaagatgaataccaagaaatcaccaagcaaattggccgccttcccaactacactgaaacaggcatttactctggcatgtggtcagaacactgctcttataaaagctcagcctccatcttgcggaacttttatacccagggcgaccaagttgtccaaggccctggcgaaggggcaggaacacttgatattggagacggacaaggggtcgtttttaaaatggaaagtcacaactccccatcagccgtcgaaccctatgaaggggcagcaacgggtgtcggcggggtcgtccgtgacgtcttctccattggggcccaacccattgccctagtcgattctctccgctttggtcctttaagcgacagccatgagcaaaagctggtttcccaggccatcaaagggatagctgactacgggaacattttgggtattccaagtcttgctggtgagttgaaatttgatccagcctaccgcaaaactcctttaatcaacgccatgtgtgtaggcttagtagatgttgacaaaatgcacaaggggctagcctctggggttggcaacaagctcctatacgttggggcgacaactggtcgtgacggcatccacggggcttccttctcaagtaaggaagtcactgatgaaggtcaaggttcagcagtccaggcaggggacccccacaaggaagaagttctgatcgatgcctacatgaccatgttggaccgctatcaagatggcatcattggcatgcaagatatgggagcagctggtttagtttcttctagctccgaaatggtcgaaaaagctggccttggcttgtctctaaacatggaccaggtgcctatgcgggaaaaagacatgacagcctacgaattattattgtccgagtcccaagagcggatgcttttgtgtgtcaaaccagactatgtggaagacattagccaaatattctggcaagctggattagaagccagtgtcattggtgaagtgactgaaggtgaccgctaccaagtcttccagcagggtgaaaaggttgtagacttaccggttaaaagcctggcttcaggtgtgccggagttaacttatgaagctaagcaaccagaatggatggcttctgaccaggaggacgactataaacccgtgatttcttcaattgaagaagccagcttaagcatccttgcatctgatgacttctctagcaagcagtctgtctttaaccagtttgactctctggctaagaaccagaccctccgtcaacctggctccgatagtggtctcgtcaaaattccaaataccgataaggcagttgccctaacagctgatggcaacagtcgctatgtgtatttgaacccggaagtcggcgggcaaattgcagtaagtgaagcggcccgcaatattgttgccagtggagccaaacccttgggtatgacagatggattaaactatgggaatatcaacaacccagaagtttactacagctttgaacaatcctgcttgggcatcagccaggcatgtgaggtcttagacacccccgttgtatcaggcaatgtatccctcaacaatgggccgtttgacaccccaatctaccctagtccgattgttggcatggtgggtttgctcaaagactaccgtaaagttttggccaatcaatttaccagtggtgaccaagctatctacttgcttggcgagactggggccgattttgccggcagtttgatccaaaaaattcaagaagatcgaatctttgggtctccacgcatcaatctttaccaagaaaaacaaaaccaagattttgttttggctgctaatgaccagggcttgttggcagcgagccatgacgtgtcagaagggggactttttgtccacttgctaaaaatggcttttggcactgattatgcctttgacctagatagtgacttgaccaaggaagacctctttagtgagactcagtcccgctttatccttgcagtggatgcaagcaagcaggccgactttgaagctcttgctaaagaagcggaccttgaagtccaaaaaattggtcaaaccaaagaagccgatcaaatcaaagtgaatttagcagatggaacacgggaagaattgtccaagaaagaattagaaattatctggtcccaagcctttgaccagaaatttgactaaggcaagttgacctaaaaagaaaggagcccagcttttgtttgctatatggaaccacccccaagcaggacaggtaagccagttcgccttgctcaacctgcaacatcggggccaacaaggggcaggtattacagtttttgaccaggaaaaagggacctggttgacccacaagggacctggcttggtcaacgaggttttcgaacacaaggaaacccttgaccgcttagctggtaattgtgccctggggtctgtccactactcttcccaaaaacaactccaagaccaaaccgatattaaccctatccgtttttcatttttagatgaatcctttgctatcgctttttcaggccatatcgtcaacgccaaaagtttgcggcaggagctggaaaaccaaggaagtatcttttactcgaattcggatggcgaggtcttcgcccacttgatccgtcacagcaaggaagagtccatggcagataaaatcaaggaagcctgccaggctgttaagggtggctattccgttagcttgctgaccgaagaagggatttatgcctttgtcgacccagcaggcctgcgcccccttgtggtgggccagctgaaccaggggaatccatcctacctggtgacaagcgagtcttgtgccttgaaaggcttgggggctgaccaagtctatgaattaggacccggacagggagtctttatcgatgattcaggctaccaggtctttaaccatgttgaccatcctggacccaacaaggtagaagccatggagtatatctattttgcccgaccagactccacaatagctggcgttaatgtctacctggcccgtaaaaacatgggccgctacctggccaaggaagatgaaggcacccagggcgacttggtcatgggggtccctaattcctctttaatcgctgccagtggttatgctggggagaaggggatttcctacgacttaggcttggtcaaaaaccagtatgtcggtcggacctttatcgaacccagccaagagttgcgagagttgggggtaaaaaataaactatcggtgatcagccaggcagttgaagataaggatatcatcttgattgatgactctatcgttagagggacaaccagcaagcgaatcgtcaaactccttaaagaggctggggctcacaaggttcatttacggatctcctcaccccctatccttttccctaattattacgggatcgacatgtcaacgtccaaggaattaattgctcaagaccggactgtccaggaaatgactgattatatcggttgtgattccctagccttcctatcgattccggccctcaagcaatctgtccaggactataatccggacatcgacttgtccctttccatttttaacggggactaccatgaaggcttgggcgaccaccaaaactatttagaaaaacacctgtcgagcaagcaaatggcccaattacaaaaaggaggaagccatgtctgatttatacaaagaagccggcgtggatatcgaaaaaggatatgaatcagttgaccgtattaaaagccacatcgacaagactttaaacaagaacgttctaagccagctcggtggctttgccggctcctactccctgaaagactttgactttgaccaccccgttttggtatctggaacggatggggtaggaaccaaaattttactggcccagcaggctgacaagcatgacaccatcgggatagattgtgttgccatgtgcgttaatgatatcctcgcccagggtgccaagcccctctttttcttagactacctagcccttggtcaaaacaagcctgaccgggttgaaaaaattgtcgctggtgtggcccaaggatgtcaggaaggggatatggctttaattgggggtgagaccgccgaaatgccggatatgtacgacttagacgagtatgatttggctggctttgctctagggattgccgacaaggaccagatgatggaccccaaccaggtcaaagagggagactacctcctaggcctaccaagctcaggccttcattccaatggttactcccttgtccgcaagctttttttcaaagaccgtgactatggctttgaccaccaattggggaatggcaaaagcttaatcgaagaattactagaacctacccggatttatgtaaaagaagttctccctctcattcaggaagatttattatccggcattgcccacattaccggtgggggcttctttgaaaatgttccccgcatgctaccagaccaattaagtgctgttatcgacaccagtcaaattccaaaacaagagattttcacccttttaagtgacctgtctgaaatgagccgggaagacctttatgggacctttaacatgggggttggcatggtcttagcggttagtcctaacaagaaagaccaggttctggacaaagtccaagatgcctttgtcctgggacaggtaaccgatgaaaaagatgaaaaacttgttttaaaatagggggttacaagatgaacatcgccctttttgcttcaggcagggggaccaatgtccaggctatcttagaccaaaccaagcctgaccatgtcccggtccaggcccagtgcctggtctgtaatgatccggaggctcctgttattggactggccaaggaatacggcttgccaatccttgtcctagactccaaagggattagccggacagactgggagagggaggtcttggcttatttgagccagtatgagatcgactatattgtcctagctggctttatgcgtttacttagcccaagctttattgaccattttcaggaccggatccttaacatccacccctctctcctgcccaagtatccagggaccaagagcattgaagaagcttacgacaaccaggaaaaagaaacgggggtcaccatcttttatgtcgatgacggggtggataccggccaaatcatcgaccagagaagaatcaagcttgaccccgcttggtccctagcagacttggaagaccaaatccaccgagtcgaacatgaaatgtacacacaagtcttgacccaactagcccatgaaggagaggatgtaaatgacagctagcgacaaacgctttgccctattgagtttatccgacaaggaaggccttagctctcttgcccaggcctttgtagatgctggcattcacttaatggcaacgggtgggacctaccaggcccttaaagaggcagacttacccgtccaagcggttgaggactttaccggggtcaaagaaatgctggatggccgggtcaaaaccctgcatccaaaaatccatgggggtcttttagccgaccgcagcaagccggaccaccttgccaccatggccgaccaagccattcccaatattgcttttcttgtggtcaatctctacccctttgcagaagtggtggcccaggatgcttcaaatttcgaccgggctattgaaaatattgacatcggggggccaaccctgttgcggtcagctgctaaaaaccatgccagcctgactgtattaacggacaagcgggactaccctcttgtcatggaagagctaaaagcccaaggcaaaacctccctgtccactagaagttacttagccagcaaggtcttccaactgactgcacactatgaccaagaaattgctaactaccttgcccaggccaagcaaggccaggtgtccgaccaaggccaggactggccctttatcagccaaacttatgacttgaaagccagccttccttacggggaaaacagccagcaaaaagcctggttttacacagacggtcaggctagccaggctagcgttgctggggctaagcagctaaatggcaaggccctatctttcaacaacattaaggatgctgatgtggccattaatatgctagccgactttcctgaccaagctactgcgattgccatcaagcacatgacaccctgtggggttggacgaggggacaatatccaccaagcctttgaccgctgttaccaggctgattccaagtcgatctacggtggcattgtttcatttaaccaagtagtcgatgaaagattggctcaaagcctgtccaagattttcttagaaataattgtggcaccgggctttaccgactcggctctggcgattttaaccaagaagaaaaaactccgcctgctcgaaattgacctgccagaaaaaaaccaggcaagaccacagcaagtgtcggtttctggtggtctactcatccaagagcccgaccagtcaaccgagctagacttcccgcttggccaaaaaccaagccagtggacctattatggagaggaccaatacagttcggatgacctccagaccatggcctttttgatgaaggtggtcaagtacgtgaaaagtaatgccattgtggttggagctggccagatgaccttaggcgttggtggtggccagcctaaccgggtcaattctgcccagatcgccctggaagagatgaaggccaaggacttagagactgacagtaaaatcatcctggccagtgatgcctttattcccatgcgggatacggtcgatttagccagccaatatggggtagacgttattgtccagccgggtggctccatccacgatgatgatgtgatagccgcttgccaggaaaaaggcattgacctagtcatgaccggctaccgccactttaagcactaaaaacagaacaaggagggatatagatgtcaaaaaggatattgattgttgggtctggtggcagagaacacgccattgccaaggccctggaccaaagcccgcaagttgaccgcatctacctggctcccggcaatcccggtgtattagccaatacccaaaaaacccagttagtggctattgaccaagaagattttgcatctttattagacttggttgaccaagaaagcattgactggaccattgtgggacctgagaaggtcttagaagctggcatagtagatgctttccggcaagcaggtcaaaccattattggaccgagtcaagcggccacccaaattgaaagctccaagtattttgccaaacaagttatggcccaagctggggtagccactggcagctttcggctttttaaccaggacaaacaggatgaagttgaagattatattaccagccttccccttcctatcgtccttaaaaaggatggcctagcttctggcaagggggtttacatctgccagacctatgaggaagccttgactaaggcccaggacttgttagattcacctgaccaagaccttattgttgaagaatttttagacggggaagaattttcccactttgccctggtcaatgaatcccatattatccctctcggcttggcccgggaccacaaaagagcctatgacgggggtaagggtcctaacaccggtggcatgggggcctactcgccagttaccgaccaggaccaggctttcagccaggaaattgtagaccaaattgtccagccggttgctgaccaaatgaaggacttgggccagccctttactggcgttctcttcactggattgatgcgggtgaatgatcggttttatgtaattgaattcaatgcccggtttggcgatcctgagacccaggtccttttgccccggcttgaaactgacctagtagacttgttccaagcccacctcaatcaaacagaagtccaagttagctaccagccaggttgcagcctgggtgtcatcctagcatcggctggctaccccggccaagtggatgacggcaaggacttgaactgggccggtgaagtggaccaggccaacttggtttattctggtgtcgcagaaaaccaaggccagctggtgaccaagggcggtcggattttgatggtccaagccatgaccgattccctccaaaccagtcgccagcaagtctatgatgttttagccaagcaagatgtcgaaggcagtttttaccgtaaagatattggtttataaagtataggaggtcttaaaatggaaaaagttgcagtgattatgggtagtaaatcagattgggaccagatgaaaccagcttgcgatcaattagatgagctagggatagactaccacaagagcgttatttcggcccaccggatgaccgatgagatgaatagctttagtaaagaagcaagggacaaaggtattaaggttattattgccggtgcgggcggggctgcccacctaccgggtatggttgccgcttcaaccaccctgccagtcatcggcgttcccattaaaagctcaaccctcaatgggatcgactccctcttatccatcgtccaaatgccgaagggagttcccgtagccactatggctatcggaccaagtggagcccgtaatgctggaatcatggcggctaaaattttatccattgaagatgaaaacatccaccaaaaactagtcgacttgtccgaaacaatgaaacaaaattcaattgaaagtagtgatcaacttgactaatgaaccattattgccaggatctaccattggcatactcggcgctggccaacttggaaaaatgttgacccaatcagcccaaaaaatgggctaccatgtccatgtctttgataccaaagaagcctgcaccttccctattgctcacaaaagtgtcttgggtgactttagcgacaaggaccaagtcttgaactttgcccaagaagtggacagcttgacctatgaatttgaaaacatcaatgctgaagttttagaagacttgtccaaccaagattactttatccaaggggctaaactgctaaccatctccaaaaaccgcttgcgggagaaaaaatggttaaatgacatcggcactccaacagtcccttaccgacctatcaataacttggacgaactcaaccaggcttcagctgacttaggcttgccgatagtcttgaaaacagtcgaattaggctatgacggcaaaggacaagttttgatcaaagacgaaagtgatttaaccgaccaagccgatgacattaagtccatcctagacagcggtggcgtagcagaagccttttgtgacttcgactatgaagcatctgtgattgtagcccgcaacccacaaggagaaattgagtgcttcccaccaactgtcaatatccaccgggctggtatcttgtgtgctagctattcttctagccagctcaaagaagaattgtttgatgatattaaagctgtggcaacaaccatcgccaaagaatccgacttggtaggggtttgcggtgttgagttgtttgttactaaagaccaagaacttattgtcaatgagattgcacctcggccacacaactccggccactattccattgaagcctgcaatttatcccaatttgaccaacatatcctagccattaccaaccgtgaattgatcgaacctagactggtccaacctaccctgtctgttaatatcttgggtcagcaccttgaccacttgagagaattagtggctaaattcccccaagctattgtccatatctacgacaagggcgagggtcggacccaacggaaaatgggccacttcaccctatcatttgaaagtgaagaccaaattgcagaaacattaaaggatcctttcttacaagactggttcgaccaggttggctagaagaagttaagaactaggaggattgacatggtattagaatacaagggaaaaaccaaggatgtttattccatcgatgacgacaaagttcgtttgatatttaaagatgacatgactggcaaagacggcaagttcgacccgggtgaaaaccaggcagatattgttgtggaaggggccggggcttctagcctggccttgaccacccacttcttccaattactcgatgaaaagaatatcccaagccactacatttcttctaacttggaagaagggtcaatggacgttcgacgggccaatatttttggcaagggcttggaaatcatctgccggttcaaggctacaggaagtttccttagacggtatgatgactacatcagtgaaggtgatgacctagatgcttacacagaagtctccttgaaaaatgacgaaaaaggtgaccccttcatctccaaggaaggcctgattcagctaggcattttaactggccaagaatatgaccagattatcaatttgaccaagcaaatttctagattggtaaaagaggaattggctcaaaaaggcttggaactttacgatattaaattggaatttggccgggatgctaaaagccaagaccttattctgatcgatgaaatatctgggggcaatatgcgggtctataaagacggccagtatttattccccttggacatcaaccaatatgtcctagaaggcaagtagagctgagtttttaaccttaaaggcttgaaaaatgggtaggaaagtcgctaagatagtaaaaacaagcaaaagacaatttaggaggtaaaaaatgactttgtgggaagaaaagttcaaaaaagaaggcttaacctttgatgatgttttactggtacctggtgagagtgacgtcttgcccaatgaaaccagctccaaaccaaattagcagacaatcttgtcttaaacattcccatcatcagtgcggggatggataccgtcaccgaatcggacatggccattgccatggcccgtcaaggtggtttaggggtcatccacaaaaatatgtccatcgctgaccaagcgcaagaagtcaaattggtcaaacggtcagaaaatggggtcatcaaaaaccccctcttcttgaccaaaaaagccttggttagccaggccaaagccatgatggaagaaaataatatatccggtatcccagtcgttaacgaacaagaggacaagaccctggtcggtatctttactacccgtgacctccgttatatatctgacgaaagccagccaatcgaagactacatgacccaagaaggggacttaatcaccgctccattaagcacaagcctaaaagaagcggaggagatcctctaccgtaaccggattgaaaaattgcctttagttgatgaaaaggcccaactggctggtcttattacctttaaggatattgaaaaaaccattgcctatcctgatgccgcgaaagatgacaatggtcgtttgcttgttgcagcagcagttggcatcggtgatgaaacatttgaccgggcccgtgccttaattgaagcggaagtagatgccttagtcattgacaccgcccacggccattcccggtctgtcttggaaaaaattgcagaaattcgccaaaccttcccggatgtcactatcattgctggcaatgtcgcaacttctgaaggggctaaagccctctatgatgctggtgttgacgtggtgaaagtcgggattggacctggctccatttgtaccacccgggtggttgcaggagtcggtgtaccgcaactgactgccatttacgactctgctaaggttgcccgtgaatatggcaagaccatcattgctgatggtgggatcaagcagtctggtgatattgccaaggccatcgcagcaggtggtaacgccgttatgatcgggtctatgttggcaggtaccgatgagtcccctggtcaatttgaaatctatcaaggccgtaagtacaaaacttaccgtggcatgggtagcctagcctccatgaaaaaagggtctggcgatcgctactttcaaaacaagaccaaagctgacaaacgggtgccagaaggaattgaaggtcgggtagcctaccggggtcaagtggctgatattatctaccaaatgattggtggactccgggctggtatgggctatgttggagcacccgacatccaacacctgattgaagaagcccaattcatcaagatgagtgccactggtttggtggaatcccacccccacgatgtcactattaccaaagaagcgcctaactactctagccattcttaaactgagtaaagtttaatctttcgagataaaagaaaaatccagttcccaactaatctaccacttgctggtagcaagaattaagggaactggatttttgtgttcaattttagtgttcttgactgaagctaacggttggttggttaaccaacttgccgactaggtagccaaccaaaaagccgataaccaggataggtagccattccaattcgctttcgaagaatggttgactagtgatccaggaccaagaaacaaatttttgccggtaaagtagacccaataggctggaaataaagaccaagaccaatgggagatgaaaggcaatttttggcaaaggtaggtagttgctaaccaaaagcaagaagaccgaggacatggccactggatagatgagggaaaggacaggaacagatgtttcaatgatggtgtccaaaccttggttagccaagacaaaggaaatcaaggtaaagattacggcaaaagcattataggaaatgttaggaagcaaagagttaaagtattctgcacaagctgaaatcaaaccagatgaagttgttaggcaggcaaccaaaacaaccaagccgagcaagataaccccaacactacctaaggcttcagaggagagatattgcaacatggcagcacctaggttttggtccaagggtaggtcactagaaatcagaacattgttaccaatccaagcaagagacccgtaaaccaagctgagcaagagggcagcaataagggaggccttaaccgtccctttgaaaatttcgtggttgtcagagattcccatccccttaatggcgttaatgaccagaatggcaaaggcaatagctgcaatagcatccatggttaggtagccttcggtaaacccgtaagcgaaagctcccccgtcgccaaagttattaatggatgaagacccatcgtaactggtagcgagaaagattacacgaactacaacaatggtaacggtagccagcaatattggggtcaggtagttcccaatgttattagctaagttgtctgggtggagagataagtataaggtggctgcaaaaaagacaattgaagtaatcaatagagccaggcctgagttttcacttaagaaaggcaagactcctaattcataagctgttgtagctgttctaggaatggcaaaaaatgggccaatggttaagtaaataacgactaatagaacaactgagaagacggggttgatcttcttaagagcctcacggtagccaccgcttgacaaggcccctgtggctgtcccgattaaaggcaagccaacccctgttaaaacaaatccaatagtggctggccagaagaaatctccggcattgaagcccacaactggtgggaaaatcaagttaccagccccaaaatacattgcaaatagcataaaaccgactgttatgacttgtcgccacttcatacttattcctccttcttataattatgttcttaaggatatcacaaaaaaataacgatgaaaagagcaaatatgaataaagttatcatatttcccattaaaaacttatggcgagatttgaaagacggataaggcttggcctgacatggtccaattgactgtcgtatttttgtttacaaaaataaaatattgtaaactagaataagatggatttttaagcggacttttttaacatattttcctaatgaaaattgaaaagtagattcatgagaaatgaaaaaaggcacaccaaaacaatatcaggtgagcaaatatattacaggataagataagaggttgaaataggtgacctacatttttgccatttgaaactagcctaacattcaaatgagaatgccaggcttggactactaggctgaaatcagaatgtttggtattttaacagggatcaaaagtcatgtttgatattcaagtgagtaaaagctggtccggggtaaaatacacgaaccagcctttatcttctatctattcgcccacttcagcaataacttcaatttccactaagccacccttgggtaagtctttaaccgcaaaggcgctccgggcagggtaggtctcttggaaatagtcagcgtaaatgtcgttaactgggccaaagtccttgatgtcagccaacaagaccaaaaccttgaccacattgcctaaggttaagccctggctttccaacagggcctttatattggcaaaggcttggtgggtttgggcttcaagtccttcttttaagttgccactttgagggtccaggccaagttgaccggacaagtagaccaggttacctgtttggatgccttgggagtaggggcccaaggctgcaggagcttggtttgttttgatttctttcatcatacatcctcctattgttttactaggtcaagtatatagaaaaaacctggcagatgcacccttaaaaaagtctctgccaggctatttatttaaaaactattttattcacttgtcttaaagtggtagatgggtcccgcaccgtccggatctatgtcgacttctaggtcataggggttgaagaaccaggcatcatcacgagctgcaaaataggtgcgaccattggcctggtcctgggctaaaatgtcatgtttagctgggtcttgaatttttattcctactgaaaagccttcatggacttccgtttggccatagaccttgccaaaaaattgcacaccttgtccttctttgggtccgagttcactttcgaaccattgaacagctgcaggggatacttttaattccatttcttggactcctctcctttatcaaccggaatccatcctgactggtcagtaatcatctgccagagggggtccggtatggctaatttgtcttggtcgtttaaatgaattgcctgggcaatatgagcctggtcatcttgaattttttggggccagttggggtcaatcaagagctggcggcccactgcaaccaagtcaccactttttaaggccagctgggcatcctggccatctctaactttgccgacattaatcaagggcacccgtccagcgatatgctggtagattaactgaggcaggtcctcaatctggttatcttcgacaaagaaggaagcctgctggtagtggcggacagacaagtggacataatcaattttagcagaaatcaggtgatcaataaatcgcaagctgtcttcaatgcgaatgcctggcgcttccacttcttcaggactcagccggtaaccaattaaaaagtcctccttatccatatcttggactgttttttggacctccttgatgacccgggtcgaaaactcaaaacgattttccagactattcccccaatcatctgttctttggttggagtggggggaaaagaattgctggaggaggtaggtattggccccgtggagttctaccccgtcaaaacccgcttgcatggcccgtctactagcttgtccaaagttagtgatcaggtcttcaatatcttcttcctttaaagccttaggctggtgggcccaaggacggttggctttgacaggggaaggggcaaggatggcttggttttcgttatagttggtccgggccatccgtccgccatggtaaatttgcaaaatagccttggctccttcttttttgatggctgaagctaggcggtgaagacttgggatgttggaatctcgggcagctgatatcccgttggcgaaggcctgtccctctggtgaaatgtaagcaccagaagtaatcaccatccccaaatgactcgaccgagcctggtagtagtcgatttcctggtcagatactgttccatcttccaggctggaattaatggtcataggggccatgacgagtcggttttgcaatttagttttatggttgatttgaaagggtgtaaataattcatttgtcatatttatgctccctagtctaacattaatatcattgttaattaatattataaaatataataggaagaagcaaaagtaaaaggcaagggtcttgacttttttgctttgggtaaagcttcaatccgacatttttaaaaggggagctttagggaatttatcatgttctttttcttacctaatcattactgaaatcagctaggtgaactggtataataaggttattacgataaaaagggtgactagatgtctaagaaaagaggtttcgaacttgtaagtaaatatgagggtcaaggacttaacctgccccagcgtgccagcaaggcatcagccggctatgacttagaagcggcagttgatatcagcctcccttcgatctggcaggtcctcttagccaatggtggtttaaaccaggcagtatctttgggtcacttaccggaagaaaacgaagaatttttggcctcgaccctagtgccgaccggtgtcaaggcttttatgccaaatgatgagtacttgcttttagccaaccggtcttctaaccccatgaagcgccagttagccttgcccaatgggataggcgttattgatgcagactattacaacaacgccaataatgaaggggagatctttgtccaattgattaattacggtctaaaaccctaccaaatcaaaaaaggggaccggatagcccaggctatttttaccccctaccggaaagtagatgagaccggtatagatttaggtgaccggacaggcggctttgggtccagtggttacagtaagaactagtatcgacctggaataaaacgtacgtgatgtttgataccttgaagttgggaggaataatgtggctaaaaaacaaaaaaccatcttcgtttgccaggaatgcggggctgaatctcccaagtatttggggcggtgcccgtcttgtggcaagtggaacactctagtggaagagcgagttcaagaccgggctgacacgcgaaaccggcttaattttagtggcaaacgggccaaagcagctcccattaacgaagtcgaaattgaaaaagaggaccggatccaagtcccctttgccgaatttaaccgggtcttagggggtggagtggtcccaggctccctggtcttgatcgggggcgatcccggaattggcaagtctaccttgctactacagatttctgcctttttgaataatatcgggggcttggtcctttatgtgacgggtgaggagagtgccagccagattaagatgcgggctgaacgtttagacttggtggagaataatttctacctttatgctgaaacagacttgtcagccatagaagaaacagtcgaggaaatccgacctaacttcttaattatcgattccatccagaccatgcaccacccggatatcgacagtgcagctggttcagtttcccaagttcgggaatccactgctagcttgatgaagattgccaagtccaatgacattgcgacttttatcgtgggacatgtcaccaaggaaggcaatattgcagggccccggatgctagagcacatggttgatacggttctttacttcgaaggagaccagcaccagactttccggattttgcgggcggtcaagaaccgctttgggtcgaccaatgaaattgccatttttgaaatgaacgaaaaaggcctcaaggaagtccaaaatccttccaaacttttcttggaagaacgcttggcaggggctaatgggtcagcagtcgtggctgccatggaagggacccgtccgatcttggtggagatccagtccttgatcaccccaaccgcctttggtaatgccaagcggactgccagtggtttagattactcccgggtctccctcctgatggcggttttggagaagcgggctggcttactcctacaaaattacgatgcttatctcaaggcagctgggggagtcaagttagatgagccggcgattgacctttccattgccgtgagcattgcttccagctacaaggaagaagaaacggacccaaccgactgctttatcggagaaattggactaaccggggaattgcgccgggtttctaaaattgaccaaagagtcactgaagcagccaaacttggcttcaaacgagtttttatccccaaaaataaccaagagggttggacttatcccaaaggaatccaagtcatcccctgtcggactattggccaggtcctgcaagttattttctaaagtaaattaggttgatttttcacaaaaagtctaggaggatttttcacaaaacgaactcgaattaaccccaaaaggctcatttcagtctttactaggcttatgaattgtttttatgacctcttttctttataataaagcttgtgttaaccgtccgctcaagaacatggggagaatgaaaactatgattaaattgaacaagcagttgacacgttttgcatctattgccctggctgccggtcttcttgcggcctgcggtgaagaagaaacagaagaccagttggtggatggagaccagattgagatcgctgtcctaaactgggaagaaacgattgctgcaaccaacgtgattggcaatgtcttagaagacattggctatgatgtgacgacgacaacagttgatgtggctgtcctgtggcaagcccttgctgatggtgaaaccgatgcttcagtttcagcttggttacctattacccacggtgccttagaggaagaatatggggaccagattgaaaacttaggcgctcacattgaaggagctaaggttggcttagccgttccaacatacatggaagggcttgaatccatcgaagacttgacagatgaagcgggtcaagaagtgaccggtattgaacccggatctggtatcatggattctgctgaaaatgccatggagacctatgacaatttagcagactggaacctacaaaatgcttcaactggagccatgctgtcagaattacgaaccagcattgacaatgaagaagaaattgtcattacaggctggaaccctcactggatgttccaagaatatgacttgaagtatttagatgacccagaaggtgcctttggtggagaagaatccatcattacgcaagtccgtcaaggcttccaagatgaccaccccattgcttactctgtcttagataactttgaatgggaaatggatgacatcgaaagcgtggttcaagaaatggctgaaacggatgacccagaaggtgcagctgaaagctggattgaagcgaaccaggaccggatagatgaatggcttgaagaggctagacaactagcccaagaacaatcggaagaccagtagattcaagtaaagtagcttaaataatgtgaaagaatagcgtaggttgtccagcctacgctattcctctttagcagcccgttttctttgagttaagaagggacaaggcttctaatagctaaaagtctttcaaaatggtttaatgggccggttaaattgattataatgtaaagtatcaggttggcctgagctgaattaaaccggcctgtccaagtgacctaagggctgactttagtctttactctagcatggaggagtctcaggacaaatgatgatccattagcaatacttaacattcagaaaaaggagggatgtcctatgaggaaactcatcatcctactatttattttcgtggggggtagtataggttttaacaactttaccgacctcctggatagtcttccacccatgtctatacctacaattatttacaatccttggttgggcatggtcttaggggctggcatcttttttgtcgtttcactctttatagtggaccccatcttaaagggcttaaaacgactgacccggtttctaaccgatttaagtttgtcttacttgctttgtggaagtttggggcttgtttttggtcttattatttcatggttaattaatttttccctccaaactttcaatatcccccttttaaatgaagtggtttcggctgtgattaccttcaccttggcttatgtcggtttttatatcgggaccagttaccatcaagaagtggctgactttctaaagaaccagcaagaccgaaggaaggaccaggaacctgaccaggcaggagagacggggcattttttgaaatacaaggtcttagacactagtgtgattatcgatggccgtatcttaggtattatacggtcaggttttttggaaggagtctttgtcatctccaaacatgtcctccaggaacttcagtatattgctgattcatcggacaatttaaaaagaagtcacggtaggaggggcttggatattttaaacgagctccaagatgacgaccaaatccaggtagaaatggatgaccgggactttgaagacgaagctgaagttgacctaaaattagtccggctagcccaagacctgaaaggagccgttattaccaatgactataacttaaacaaggtggcccagttccagcaggttcctgttttgaatatcaatgaattagccaaccaagtcaaacctgccattatcccaggtgaggagatgcgggtcaccattgtcaaaaagggtaccgagagacagcaaggcgtggcatatttggaaaatggaaccatggtagtagtggaggatggcaagcactatatcaaccagtccctagatgtagtggtaacctcatcactgcagaccaatgcgggccggatgatttttgccgatattgccgaccctaccaatgttggagacccagaatttggccaggaccaaagcacggcagaaggttagaccttgtttttatagaccagagataaactggtaaatctctgcttgcttttaaccttgatcggatgaatgataaagacaattatggtaagctagtaggggtaagctaaaagaactgaattaattattttaatagttgaaatacaaactgtgatgaatgaaaaggagataaagtcatgtcagataagatccgcgtccgttatgccccaagccctactggacacttgcatataggcaatgcccggacagccctgtttaactatttatttgcccgccacaacaatggtgattttattattcggacggaagataccgaccagaaacgtcatgttgaaaccggtgaagagagccaatttacttatttaaaatggttgggcatcgactgggatgaagggtcagatatcggaggcgattacggtccataccgtcaatctgaacgatttgacctatataaccaatacattaatgacttgcttgaccgcgacttagcctacaagtgctatgcaacagccgaagagttggaagaaatgagagaaaaacagcgggcccaggggattgcgccccactatgatggccgccatgcccacttgaccaaagaagaacaagatgcctttgaagcggagggaagagatccagttatccgaatccgggtgccagaagaccaggtctaccgctttgacgatatggtgaagggggaagtcagctttgatgctaaagacattggcggggactttgttatccgtaaggtggacgggtctccaacctacaactttgctgtggcagtggatgaccacgaaatggccatcagccatgtcttaagaggggacgaccatgtttcaaatactcctaaacaattggtggtttacgacgcttttggatgggaagccccagtctttggccatatgaccctgattattaatgccgaaaccggcaaaaaattaagcaagcgggacgaaagtatcctgcaatttatcgaacaatacaaggacttaggttacctccctcaagctttgtttaacttcattgccctccttggttggtcacctaagggcgaagaggaaatcttttctaaagaagaatttatcggtatgtttgacacagaccggttgaatacctctccggcagcctttgatgagaagaaattggactggatttccaaccaatatattaaaaaattggatgatgaggccgttttggacctagccaagcctcatttagaagaagcaggcctttacgatcctgacaaaaaagattggtttattaagctagcaggtctctacaaggaacaaatgagctatggcaaggaattgcttgacctagcctccctctttttcggacaagagattagttatggtcctgaagaaaaggaagtcttggacggggaaacagtcggccaggtcctcaaatcctttaaggaccatttaagtgaagtggacccctttgaaaaagaccctatcttcaaagccatcaaggccgtgcaaaaagaaaccggggtcaagggtcgcaacctctttatgccgattcgggtggcaaccactggtgagcaacacggcccagagcttcctttagctatcgagttgattggctatgaccaaacccaagcccatcttgaccaggctctttcctatgtggaaggccagtaaaaaggcaaatctctaatagaaagcaagtggatgaatgcagtatgcagaacttcttgacctcctgcccctacaagaacaagggaagatggatttggggctagcaaccatgacccaggtgatggacttattgggcaagccccaagaccaggtccccatggttcatatcgctggcaccaatggcaaggggtcggccgcagcctttacagagcgaatactcagggaggctggctacaaggtcggcttgtatatttccccttccctagtggaatttaatgaacggatccaaatcaatggccaagccacaagtgatgatcagttgctcaaggcagtcaagaccctaagccaggccttagaaggcacatccctttgcctgactgaatttgaactttttactgccctggcctttttgaccttccaggaccaggcttgtgatatagccgttgtagaggtcggattaggaggacggttagatgctaccaatgtgataagccgtcctgccgtcaccgccattaccaagattggcatggaccataccgcttttttaggggatagcctgccagaaatagccggtgagaaggcagccatcgccaaagccggctcgcctatggtggtctatccccaggggccagaagtgactcgggtgatccaaaatcaggcggaccgggtaggagcctctctgaccctaatttctcaatccgacctgacttataacctgacttcggacctcttgcaagactttgaatacaagcaggttccctaccgcatttcacttttagaagattatcaaatttacaacgccctggtagcactcgaaatctcttttgccttacaggatgctggctggcagattagccctaaagccattaaacaaggtttggttgagacccgctggcccggccgttttgaacttatcgcctctcatccgaccgtgatcgttgatgggtctcataatgaagacggcctgcaggctctcttggctaacctagaccgctactttccagaacaaaaaaggattgggatcgtaggcatgttggccgacaaggatgttgatgccgccctagctcctttaaccaaaagctttgaccggctttatacggtgacacccgattcgccgcgggggatggcagcccctcaaatgaaagaaaaactgaccgaaatggtgtcgccgtctactcgggtcatagcttgtgaaagttataaccaggccttagacctggcaggtcaagtagccggcggagatgacctaattgtcgtttttggaagtttttatattgttggtaagtttagacagctgattttagcaagaagaaatggggaagtttaattggtagactaccagagaattgaaaaagcagtagaggaaatattaagagcagtaggggaagatcctggacgtgaaggactacttgagacacccaagcgggtagctaaaatgtatgctgaacgttttgcaggcttggaaaaagatccagcagtccatactcaaaaatatttccacgaagacaatgaacttgttttggtcaaagacatagaatttgactccacttgtgagcaccacctcctacctatcattggcaaggcccatgtggcttataaacccaaagatggtcgcgtgattggtctctccaagcttgctcggattctagaagatgtgaccaagcgcccccaacttcaagaacggattaccaaccaagttgctgatgtgattatggacaacctagagcctgaaggtgtttttgttgtggtggaaggtgaacatatgtgtatgtccatccgtggcatcaaaaagcgtggctccatcactgtaaccaaggctgaacgaggagttttccggcaagacaaggaactcaaaagagaagtcttggacatgattaaggaataagtttttgcctatggagaccatgacggattcatccttcattggcaaagataggctgaaaagagaaggagtcaatccctttggtattggctctttttaaaataagtggcttgaagaaagaggaataagatggataaaagagataagatacgcttgcaagggatgacttttcacggccaccacggtttgatggaggccgaaaccaagttgggtcagatttttaaagtcgaccttgtcttagtaactgacctcaagttagcgggtcaaacagacaagatggggcacagtatccactacggggaagtttatgacctggtcaagtccattgtggaaggtaccccctttaagcttttggagtccttggcggaaaccctagcccaagaagttctcaagacttttgaccaggttgaggaggtcttggtccgggtcaacaaaccccaggccccgattcctggtgtctttgacaatgtagcggtggaaatcacccgggcccgtcactagtttagtgctaagaccggacaagcttgaataggtaaggaggaatatagagtgaagggtgttatgataggactcggttctaatatggggactaagttggcttacttaaaccgggctttggccaaaataaatagcctagaccaggtagcagtcaagcaagtttcaaaggtttaccagactgaaccggtgggctacaaggaccaggacgatttttacaatatggttgctggccttgaaattgaaccaggcaagacccccttggacctcttagaagacttgctggcgattgaggcagacctggacaggaagcggaccattaaaaatggcccccgaaccattgacttggatgtcttgctggtggagggtcaagaaattgaccatcccaagctccaagttccccacccaaggctccaggaccgggcctttgtcttggtccccttggctgagttggaccccaactacctggttcctggcatagataagacagttgcggacttgttggcttctttaaaccaaaccgacctagcaggggtggaggctttgggtcagttgacgaacctattagaagaccgtgaggcttgacctttaaaaagccaagcatgggaggatagaaacaatgaccaaagaagagattgtagtcttagacggatcttatgccaaccctggggatatgtcttgggattttttagaggcatatgggaaggtgactatctatcaggatactccccatgaccaggttcaagtgattaaggaccgggtgaaagaggctagtgtggttatcaccaacaaggttcccctgggggaagaaatattaggagcttgcccacagttaaaatatattatcgtctccgcaacgggctacaacaatgtcgacctacccgctgccaagaacttaggtatttcagtctccaacatccccgcttacagtagtgcttcggttgcccagcactgcttggcccttttgctctatttaactaaccaggttgaccactacagccaggcagtcggccagggtcgctggcaggaggaaggctggactttttatgaccaggactaccctatccaggagctagacggtaagtgcttgggcgtggtgggctttgggtcgattggccaggcctttgcccgaatttgccgggctttaggcatgaatattttagcctacaaccggagtcaaagccccagtggccaggaacttgctcgctatgtttccttggaagacctacttgccaagtctgatgtgatcagcctccacctccccttgacggatcagacctggcatattatcgacaaccaagctctttcacaagtgaaggatggggtcattttactgaatactgccaggggtcccttgcttgacccacaagccttggctgatgccctaaaagatggccgggtcaaagcagctgggattgacgtcttggaccaagaacccatgccccgtgaccaccctttagagggtttggctaattgtatcctgaccccacacattgcctgggctagccaggaaagtcgccagcgacttttagagaagatcgaccacaatttagcggcctaccaagcgggtcaacccatcaacttggtttaagttatagaaggaaaggtgacgaagatgaaagtatccctccttgaacccctcaatgtttcccagaacctaattgaccgcctagcccagcccattaaggacctagggcatgactttgtctattattcagaccaaaccagtgaccccgaggaattggcagaccggacgggggattctgatatcgttatgattgccaacaccccctaccctaaacaagcctttagtcaggcagacaagttgcaactgatcaatgtggcctttaccggtattgaccatgtagaccaggaggccgcccgggggaaagggattcagattgccaatgcagccggttattcagaccaatctgtcgcagaacacgttattggtctcatcctggacctctaccgccagatttcatggggcaaccaagccatccgccaaagtaactttcctggccccagccagggtagggttctggcgggcaagaccgtgggaatcatagggactggcaatattggcctgaaaactgctagcttacttaaggccttcggtgttcaatttttagcctatagtcggactgaaaaagaccaagccaaggccatgggagtaaaatatgtttccttggaaagattgctggaagaaagtgatattgttaccgtccacctcccccataatgaccaaacccaaggcctcctatctaaggacaaactggccttgatgaaagactctgctattttgatcaactgtgcccgggggcccattgtggataacgatggcctagcagaccttctcaaccaaggccaactagctggtgctgggattgacgtttttgacacggagccccctttgccagaagactataaactcctccaggcccaaaacaccatcttaaccccacatgtggcctacttaactgaccaggccatggttaaccgggctaagatcgtttttgataccacattggcctatttaaagggggaggaaaagaatatccagcttggctaggggacttaaaccattactgctataatggatttgaatttaaaagattggaggcttgttcaatgattaaagtctataatactttgaccaataaaaaagaaccctttgaaaccattgaagaaggcaaggtgaccatgtatgtctgtgggccgactgtttacaattatattcatattgggaatgcccggtcagctgtagcctttgataccatccgcaaatacttagaataccggggctaccaggtcaagtatgtctcaaactttaccgacgtggatgacaaggttatcaaggctgcccaggatatgaacttggaacccagccaagtaacaagccggtttattgatgccttttttgaagatacagagtccttgaatgttagacgggcggatgcccatcctacagttaccgaaaatatagacaatattatagacttcaaccaagtcttaattgacaagggctatgcttatgaatctgaaggggatgtctactaccgaacccggaaatttaaagactacggcaagttaagcgggatttcggttgaccaactcgctagtggtgccagcaatcgcttagacgaggcggaccgaggtaaaaaagaagatccactagactttgccttgtggaagcaggccaagccaggggagatttactggaaatccccttgggggcaaggtcgaccaggctggcacattgaatgctcggttatggccagccaagaattaggcgataccattgatatccacgcaggaggccaggacctacaattcccccaccatgaaaatgaaatcgcccaatctgagggcaaaagtggccaagcctttgccaattactggctccacaacggctttgtcaccatgaacgacgaaaagatgtccaagtccttgggcaactttaaactggtccacgacttgagaaaaatccataatccccaaacccttcgctttttcctagcttcggcccactaccgcagacccatcaattattccgaagaggccatacatgaagccaagcaaaatttgaaccgtattaagacagccttggccaatgcccgccaccgtttgcagacagcccaggaaactttaccagaagatcaaaaagatattacagcttggcaaaatcttaaggatagctttatccaggatatggacgatgacttccaggctcaaaacggaatagcagacctttatgaaatgatcgctagtctcaaccgctatattgctagagaccaggtgtctaaacaagtgattgacctctacctagaggacttaaaagccatcctctatatcttcggggtagaaggtgttgaagctgaagaggatttattagatggggaaatcgaagccctcatcgaagagcgccagcaagctcgagctgaccgcaactttgaccgggcagatgaaatcagggatgacctccgtgaccggggaattattctagaagatacccctcatggtgttcgttggaagcggaagtctcgggatgaagaataaggatgtccaactcttaaacggactggccctggcctatatgggggatgcggtttacgaactatatattagacgctacttactggagaaaggatcgaccaaacctaaccgtctccaccaaagcgcaacccactatgtttcagccaaggcccaggcaaggctcattgaccaggccttggaccaagaccttttgacgtctgaggagcttggaatttttaaaagaggccggaatgctaagagctactccaaggccaaaaatacaagccaggcagactacaataagtcttctggttttgaggcagttatgggctacctttacttaactgaccaggtaggacggctggaagaattaattaactggtgcatccggtctgtggaagcaggcctctagccgaatcatgggctggtgctcaactgagtttcgaagcttgctcgtcgcttagggattctcgtgtggttcaaaagtattaaccgaatttagtcttccctcctactgtatttttaatatccagatcttgcccctagtggataagttgagttttgaactatgctcgccgttgtttagtaaagctttgcgacttgcccgtccttgttcattaaagttacgaactatgctcgattatgtttaatagagctttacgagtagcccgttgtttttagtatagacagctcaagccgtcgttttttaataaagcttcacgagttgtccgtattttttattgagcctccaaccatgattgccgtttaataaagcccactttgcccatcgatgtttaattattgggaggaaaccatgaccaagcaagaaagtgaaatcgtatttggccgccatccagtcctggaagctttgaagtctggccggcaaattaacaaggtctttatccaggatggatcaggagcacaagctttgaaagacattcatcatttggccaaggataagaaaattcaggtcagctttgttcctaaaaacaaactggaccagctcgtttcgggccaaaaccaccaaggggtcgttttaacagcaagccccgtagcttatgctagacttgatgacctttaccaagtggctagggacaaggaagaggcccccttctttttaatcttggatggaatagaagatcctcataatttgggttctattttgcgaaccgctgatgctagcggggtacatggcgttatcattcctaaccgccgggctgttggcttaaccgcaacagtttccaaggcttcgactggggccatcgaacatgtccctgttgcccgggtcagcaatattaaccaaaccatcaaaaaattgaaagatgatggcttttggatttacggaacggatatagaaggagaagattaccgtcaatggaatgtttcaggacccatcgccttggtggtaggcaatgagggccaaggtatttcccatctggtcaaggaaaatgtggaccaaatgcttaccattcctatgaccggccatgtgcaaagtctgaacgctagcgttgcctctgccatcttaatgtatgaagtttatcgaaagcgaaaaccttaattaagatagttaacccccaacttgcagggagatgcgagttgggggttttagttaggaagttaagaaagggactctaggttaaaatagacaaatgaatggcctagggggtattaaagttgaaactggacaataaatccaaataaggaaatttttgcagctgaaactggacaataaatcaaaataaggaagttttggagttaaaactggacaataaatcaaaataaggaagttttggagttaaaactggacaataaatcagaatagggaagttttggagttgaaactggagaataaataaaaataaggtactttcaaagttgaaaggcgacaatgggatgcacatacggtactttcgagtcaagtctcaaactccgctcaggtcagcctagaataggtgactgatttggaatgaaggtgactttctaaacttctacaattacgcagcgattgtagaattgtaaggctaagttcataaggcaaccaatcgcagcctgatctgataaacgagttatgaggccaaaaggcgaccaatcgctggccaattgacgagttatgggacaataaagcgacaatcactcagcaataaacgagttatggagcaacaaggcgaccaatcgcatgccgataaaagagtgattcgcttggaaggtcataagtaaaataaagtgaaggacctcagagataaggtagtctcaaagcaaagtgcaagatgaagtcgacatcgaaaaacagctaccgcgacgcggtagctgtttgaagattaaccttggtgaggtcccagcagggtcgaatggggtttaagctaagattcccttattagtccttaccggagtaatttctcagagaggcgggcgaaccaatttttccgttctttttcctttcgctcttctttgagattttgggattttttcaagagagagtattgaacactgattgcctcttcgtcttctttgggttgctcttggctgtaattaccgtcactgtccaagacccaagccttggtattgtcactcaggtacaggtctaagaggtcgataatgtgctgggcccagttcttgtccatgactgggaaagctagttctacccggcggatcatattccgggtcatcatatcggcagaagaaagatagagtttttcttggccattttggtagaagtagtagatccggctatgttctaagaagcggccgactatggatcgaactgtgatattttcactcacacccttgactccaggaatcaggcagcaaatgccccgaacgatcaggtcaattttgaccccttcctggctggcttcaaaaagtttcaagatgatgaccttgtctgttaaggagttcatcttagcaataatgtggccgttgccatgttttttgtgggaggcaatttcattgttaattttttcgataaaggtatctcggatttcaaagggggaaacatggaggtggttgtagtcgggctgttcagaataaccactcaggtagttaaagaacttagccacatcttcggttaagtctggttggctggtaatgatccccatgtcggtatagaggttggcggttttttcgttgtagttaccggtccctagatgggcataacggcggaagccattaggggttttcttaaccactagggttgccttactgtgggtttttaactcctccataccgtagatgatgtggactccagcttcctcgagctccttagcccagtggacattgttagcttcatcaaaacgggccttgagttctaccagagcggttacttgaatccctcttttggctgcttttttcatggcagctaccagcggggaatccttggagacccggtagagggtcatcttaatggcaatggtgttggggtcgtcggctgatttttcaatcatctcgatgatgggtttgaaggaatcgtaagggtggtggaggaagatatcctgcttgtcagccccatcaaaaaccgaccgtctaattaaaacgggcgggtaggttggactgaaaggctcgaaggtcaggtctgggtgaacgtcttccaagaggtcgtagaggtccattagaaaggtcaagtctagaggaccatctagggcataaacgtcacgttctaggagatccaactcttccattaaaaaggcaacatcgtcggcatagcgggggtcggcgtcccgggtatcaacttctaagcggacagccataccgttcttccgccgttcaatgtagtcttcaataacagataagaggtcttccgctccttgctcttgtagttctaagtcagcattccgggtgatacggaaaaagaaagaatactggacttggaagcccttgaagagggcatcgatgttttgccggataatatcttcaatcaagacatatttttcttcaccattcaacttgatctgctggattcggtctaagagagacggaactggcacaatagcaatatagggattgccgtctcgctcaagtttgacgaaaatatggatcaggccgtcattcagatgggggaaggggcggtaagcatcaatgccgtagggggtgatgcctggttggatattttcagcgaaataatcccgcaaggcctggctgtctaagccttcaagtagctgggtttctggtgccttgacgccaacttctttgagctcggccatttttttcttatagaggccatattggtatttgacatttttttcattgcgactagcaatttcgtctaattgtctattgggagaccattgctttttggtatccggatctgtaacccctaatttggattggtcttggagaccagccaccctaactcggacaaattcatccaggttggaagacccgatggaaataaatttcaattgttcaagcaaggggttgcggtcatcttcggcttgggcgataacccgttcattgaaatctaaccatgataactcacggttctcaaaatactttggatcactaaaatcaaccctttgggaaaccatctatcataactccttatcaagtgtattgggagattttaatctccctcgatgcccccctttagaggggccatgccctttcattataagctattctgggcttataagctaataattacaatttcttagctgcttactggtcatcctgggcatcgataaaatggatgtcaaccttgtcgccgataacccgctctagatggttgcgctgcttttcggcccggtaacgttcggcgatgatattgcccttatatctaacggtcagattatagccttcttttcctttttctaggtcgatgttttcgaccgtattaacatgggagtcgttgagagcttcagcaaatttggctagagagcctagacagaggatcatgtctaactcatcttgagtgaaccagtcgctggtcgacttggtgtactggtggaagagggacttgttcttataacttgcaatcaaggccaatttcacccggtctttatgggtaaagccctttaagttggtattggagatcaggtagaaggtgtgctgggattcggccttgtcttcgatcaccttgcctaggtagtaaagggctgccccaaagtgggcgaattcaacgtctaagatagaggggtggaggatgtccaagtcagctaaaacatccagtagacgactcataatgttcatgcgttgactagctggcaagtccatcatccggtactgtttggccatccggtaaacggtttgttgctgaataaagtgcaaagagtaggggtggtagggcagtcggttaatgtactcaataatgagaccttcccggattccgtaactagagacaacaaaggcagtcgcatccatgaccttaaataattccataaaaacaatagtcgcggggatgataatgtctcggcggtcagatgacaaaccgtccaagtctgacaagtctttaaaggaggtttcagtaaaggtattaaaaacctggtccaaggcagcttgccccattgagtaaccgtgaattccagccaagggatagtcttcctggtgctggtaaacttccgcaatatttcgagccgaccccccaaccccaatcagaggcacctggcagtcctttagccaagaaaattcctggaattggtcagctacccacttacgagcttttttgatggccttagcatcgttgtggtccttgtcttggaaaaaatgttgttttaagctgacagttccaaagggaaaactatggctggcccggacttgtttgtccttaaagagggttaattcggttgaaccaccgccaatgtcaatgctgatcccatcttggatagggagggtgtggcggacagcatagttgccgtagtaggcttcttttttttcggaaagcagttccaaatcgaccccagtttcctccttaacccgctgtaggatccggatggcgttgtcagattgccggatagcggctgtggcgatggggataagttgtttaatcttgtagagcttggcaatatccgcgtaattttttaggatgtcaattaagaggtcaattccttggtcagacatcatggttccatctaggtattggactagccgggctgggtttttaatgtttaaaatttctctaaaactattgacagcatcgatttcaaagatgaccaggcggatggtgttagacccaacatcaatcaagccgatgcggttagcttgcttgtttgtatgaaccaaaatagggactccaatctattttaaacttaagactatcatactaaaaaaagcccttgcttgtctaagctaaaccgtttacaaatacagtttttctaagtagctaaaacttgtctgatccctaaactttttgcccggaaattttgacctgacaagtggctaggcctgacttaaggaggaaaatttgttataatgatcaattgcaaaggaatagacagacctcatctcaaagctagctgtacagaaaggaggatctggtcagatggctaatgaaagagtcgaaaataagctaaaagtcttacccggcaagccgggctgctatttgatgaaggataaggacgggcatattatctacatcggcaaggccaaaaacttgaagaaccgagtccggtcttactttaagagtagtcataccgggaaaacagcccgcttggtgagtgaaatagccgattttgaatacattttaaccggttcagacaaggaagctctcttacttgaagtatccctgatccaaaagcacaagccccagtataatatcctcctaaaatatgggacgacctacccttacttgaagattaccaatgagcgggaccccagattggtgatcgattcagagatcaaaaaagatggtgccaagtactttggcccttatcctaatgtgggggctgccatgcagacccagcaactcctgcacaagatctaccccctaagacggtgccccaaaaaccaaaaaagaccctgtctctattaccatatgggtcagtgtattgggccatgtgaccatgaggtttccaaggaagagtacaaggagcaaattgccaagattgagtctttcctcaaagggaatgtaaaagatatcaaggccgacctgaagcaaaaaatggaagaagcttccgcaaacttgaactatgaagcggcagctgaattccgagaccagatttcctatatcgaaacaacagtcgagaagcaggctattgtctccaacgactttgtggaacgggactttttcaacttttacatggacaagggctggatctctatccaggttttctttgtccgccaggctaccctgatcaaaagagaagccgctatgtttccttgctatgacccgcccgaagaggaattgatgagttttatcgtccagtattaccaagagaaaaacaatttactgcccaaggaaatttttgtcccgccaggtttggacttggacctcttggctgatatcttggacactaaactccatgtcccccaaagaggggagaaaaaacacctcttagaccttgcttataaaaactccaagcaggctctacaagagcgctttaacctaattgaaatgaagcaaagaaaaaccacaggagctgtgaaagacctgtcccaagccttgggtctaccctaccttaaacacattgaagcctttgaccactccaacatccaaggtactaatcccgtttcggccatggttgcctttaaggatggcaaggaagacaagcaaaactaccgcaagtacaaggtcaagacggttgaaggggctaatgaggcagccacaactaccgaggtcattcgcagacggtttacccggctcttgaaagaaggcaaggccctgcctgacttggtcttaatggacggaggaaaggtccaagtgaatgccgctgtcgatgttatccaacatgaacttggtcagtctaccccagtggccggcatggttaaggatgataagcataagacagccggattgatctttggcgaaaacttagaccccgttcccctcgacccaagaagtcaggccttctacttggtccaacgcatacaggatgaagtccaccgctttgccatttctttccaccgcaatgtccgtagcaaaaattcctttagttcggaactggaccagatcacaggcgtgggtcccaaaacccggaccaagctcctccgccacttccggtcaatgaaaagactaaaagaagcaagccaagatgacatccgggaattggggatcaatcggaaagttgctcaaagaattgtcgactttttacacgaaaaagacagggaagaagtcaagtaaagttgggccagtcccaatttttgaaaagaaatgatgtcaactcccctttagagaacgtctctaaaggggagtttttcttgcttgatttaatctagggcaccggcttggcggagggtggtttaattataggggaaggctttttagatcttttattcttcacctaagtcccaggctggaacgaccgctccttcatagtagtcttcgataaattctttaacagtatctgtttggtaataattaactaatcttgccagtgcctcgtcctcttcattttcttccctcgctacgataaagttggcctgacgaaggagttcatcatcactttcaacagctatgctatattccgtcactcccaggccagaatcgatggcaaaattggagttaattgcagcggcatccaaatctttcagctggatgggaagttgggctggatcagaagtgataaattcaaggtttttagggttgtcaacaatatcatccactacgacctctaaaccagaatcatcaggcaaggtgatcaaaccctgagcagcaatgagttgtaaggctcgaccttcttgggtaggggagttgggaataccaatacttgcattatcaggaatttcttcaacactatctaagttataggagtggagggccatgggtaaggtaatagttcgagctagtgggacaaagtcgtaatcttgttcttccatcacatcctccaagaatggttgcgtcatgaatgaattagcatccaaggattcatcgtctaaggcaacattgggttggacatagtcgttaaagacgaccacttcaatattaaagtcatcttctgcagcttgatcttttacaaaattcatgacttcttcagctggtccagcagtaacgccgactgataggactccgtcttcatagagaccttgatttgcttcttcactttgaccgcagccagttaataataaacttccggttattagtaatagagaatttttaaggcagaatgactttaccatctctgacctacctcctatgacatttgagttaaagtaagggaactgtttgaactttcgatagtctttgactaagcatggattcaagttaaataaaaaaccttagttcagcaagactttaccctttattttgcttgccaagttcttttcttgcggtccaggtcgtacagttaaatccatccttattcctcctcagcctttcctgatatatggccggttaaaaattaaaattattatatcaggataataaaagaagtcaagttaggtcggtcttgtttggctaaataataattttggacacctggattatgcattagtagtttaataaataacgttatactcaaacttagggttaaatttgagaattatttgcttgtattctcaaacaacagatattatccgagaatcttccgctatatttctcaaacaacagatgttatttgagaattcaccggtttgattcttaaacagctaatgctatttgagaattaacaattccaactagtaagtccaacatttcataaagaccaactacccatcagaaggatagttggtcaaaaatagcgatctgatgtaccccccaatcctggtcgaagctaaaggcaaagcaggcaaggcaaaagccagctaggtttcaaatactaactggctcgctttaggactaataccagtccttagatttgctcttgtaaaatttggtcaggctttttggcccgtttttttccctgtgatttaccttgggcgtaatggtcgattaaaacggccaagacacagcacaggggggcatcttcgggattggtgatttccaagctgcaaaactccccgaaagttgtcacagctttttccacagtcataatggttttgaattttcgcttgaccttgtaacttctttttaaatagttgcctgatgccttccagccaagcttggaaacagtgtagactggctgagccaagagtcgggggcgttttttaataatagccactgtgtgcccgttcatcttggccttaaatttagggtagacagaaagggttacttgcttcacctccactaggcagtggccagccatagtgtagaggaaaattttgtcgttccgcctaccccagcttccttctaccacaaaaaggtctcggttggacggggtcttgacgattctctgattagccaggtagggacttttttctttcatgtagagttgaacaaccatggtgatgctccttaagacttgaaacgatctctcttcctagtataccactactaggccaagctatggaatccaaaataaaaacttccaccaccaagtgagaaaaactggtggtggaagtctgaattgagcaggcggtcttggctagctatttgctggtttcttggtcttggctgatcacttgacttaagtcgtggattgccttgaccaagttgtctaccttggcttccatccggtgaaggaggaagagggtaatgaagatggggaagccaatattgctaatggcatctaccagcgcctgcaaaagatcaatatttaccatcattgtgaaattcctttcttatccccacagaagataacgaaggaaattcatgacttgttacggttaattgtcttggtttagacggtgggcactgtgaaagacaggagaaacgtgtttgttgtagtccaggccgtaaataattccgtcagtgacaaagtctttggcttttttcactgcttcaagtgggcttaagccattggcataaccagctgtaatagctgccgcataggtacaaccggccccgtggttggccccattatcgattttgtctgcttcaaaggtggtaaattcattaccgtcatagaataggtcagtggccttgtcaccttcaatgtcagtaccacccttgatgacgacatagtcagctcctctgtcatggatgattttggcagcttctttcatttggtctagggtggttggcttgtcgacatcagctaactgtccagcttcgaagaggttaggagtgacaatcttagctagaggtaagagttggtcccgcaagcctatcgctaactctgggtttaagacttcatcgtcacccttgcagaccataactgggtctaggacaaatttgtcctctaactggtggtccttgatgattttttcaatcaggtcgatctgttccttgttagggatcataccagttttgaaggcgtcgaccccatcttctttggataaaacagtggtaatttggatttctagggtttccagtgggataggagagacgatgtgcttccagtcttctggtctcatggaagcaaccgttgtgagggaagcgatcccgtaagtgccgtattcggcaaaagttttcaagtcggcagcaatcccggctcccccactagcatcgttaccagcaatagtccaagttgtttttgcatcgattgacataaaatagcctcctatatataaaatgattcacaagttcatgatactgcttacatagaatcatttcaaggaaatgcaatctagcttaaagcttggcctggtcgatttcacctttgaggaccaggttgatgatatgggccaccccgtcttggctgttggacttggtttggtatttggcaatagccttggcctcaggcacagcatttgccatggctgtcccgtaatccgcccagtctagcatggataagtcattgatgttgtcgccaatagttaggacttctgaaggcttgtagcccttcagcttagcatattcactgaccgcttgccccttgctggcgcggatgtggttaatttccatgtttttacggcttgaggcagtaatggatatattgtctatttctttttctaatcgtttttgaactttttctaacttgttagatccagatgtcgaaaaaacagcgattttcaagatgatttggtcatcatcttctaaaagagtgttatatgactcgacaaagttaatccggttttggtcaaccatgtcggtaatgtaagaccggatggcttcctcatcaatgtcctggttgatatcggtaaaggtgtcgaaggcatggtcgatgaaggcctgcttgtcattggtataagggccgtcaaaggtaataagttcatagtaaataggggtttggtcaaaaatctccatcatctttcggacatcatccttggccaggcctctaacatattggagctcttgctggtcattgtaataggtggccccattttgtccgataaaggggcaggtaatgcccttttcttcagccatggtgtagcctgacttgaaagaccggcctgtcgcgataacaaagtcaatccccgctgcttgggcatctttaatggcggctacattggcggcagagagcccaacttgttcattgagcagggttccgtccatgtctgacacaattagtttaatcatttgcctatctcctttatagctttctgtttgtatattatcagaaaagcaggatcaatacgacgattaacataaaaatgacctaaatctaacaggtcttgaccagttaggaaaaagatctctttaatataacgaatgttgcacatctaagaaaaagacttttttggccttggtctattccagacttgctggtaccatctcgttttaagaaagaaccagggtcaaaacttgtcgccaggcgattgagcctttacaataaagaagaaaagagggatgacatgacaattccaattcacaatgaatgggagcctgttttagaccgggctagccgaactaaaagttaccagaaattaagagaatttctcaaaaaagaatactttaaccaccaagtctatccagctatggaggacttgtggaacgcctttgacctgactgactatgatgaggtcaaggctgtgatcctgggccaagatccctaccacggacccaaccaggctcatggtctggccttttctgttagacctggccaagaggtccccccgtctttacaaaatatctataaggaactccaagatgacttgggttgttctatccccaaccatggttgcctcaacgcttgggccaaagaaggggttttgctcctcaataccgttttaaccgttcgagctcaccaagctcattcccaccgaggtaagggctgggaagagttgacagaccaggtgatccagtccctcaaccaacggaacaagcctatggtttttatcctttggggaagggcagcccgggataagaaggccatgattgacacaagcaagcatggggtggtcgaaagtccccatcccagccccttatcagcctaccgtggcttttttggatcccggcctttttctaaaaccaatcagtttttacaagaccatggtcaggcccccattgattggcaaattccagaccagccagttaattaaggggcttgcttggccagtcaacagaatttactgtcatttttttaaaaatttgttaaaataaaagtatcaaatggaaacttacggagggatagatttggaaattattgaaagcttgaaagataaggtcaagggtaaaggcgttcgcattgtcttcccagaagctcttgacgaacggattttgcaagcggtagttaggcttaaaaaagaaggcctcattaccccaatccttttgggcaaccctgaccaagttaatgagaaagctaaggaatttggctttagcatcgatggcttgactatcttggatccagaagattatgacgaatttgacgacttagtagcctccttcgtggaaagacgaaaaggaaaagctacagaagaagatgccaaaaaaatcctaaaagatgtcaactacttcggcaccatgctcgttcatactgaccgagcagatggcttggtttctggtgcagtccactctacaggagacaccgttagaccagccttgcaaattattaagaccaaagaaggagttagccggacatctggtgccttcttgatgctgagaggtcgaggccaagagcgttacatctttgcggactgtgctattaatccagacccagacaaggatgttttagcagaaattgccattgaaagtgccaagaccgctaaaatgtttgatatcgaccctaaagttgccctcttaagtttctcaaccaagggatctgctagtggtgaccaagttgacaaggtagcccaagccagtgagatcgtcaaggaaaaagatccagacttagcagttgatggggaacttcaatttgatgcagcctttgtcaacactgttgctaaacaaaaagcacctgattctgatgtagcaggagaagccaatgtatttgtcttccctgaactccaatccggcaacattggctataagattgcccaacgcttcggtaactttgaagcgattggacctgtcttgcagggtttgaataagcctatttcagacctatctcgcggatgcagtagtgaagatgtctacaacttatccttggttaccgcaacccaagccatcgcagaagattaagcaaagcaaaagaccaacccggttcatcgtgaactgggctggtctttttttactttgacaagttattgtaggcttatgaaaaataccgtctaccttgctggataatagacttaggtgaaaggacttggaagatagcagtgttaatggttaaaccgagggcgatggcgccagcgataataaaggtgtcgatgaagtaacctgtagccaagaagtactcaccggtgacaaaagaccgcatggcattataagctgatccacctgggacgatggggataatggcaggaatggaaaaaacggtcacgggcaggccaaacttacgggcggctaactggctggagagggcgatgactagagaggctaggcctgctccaacgaatagttcggacccaaagatattgattaagagatagtaaggagcccaaccaactgccccaataatcgcattggccagcaagacacgtcggggaacattgtataaaatggcaaagcctaaagaggcaataccagctgcaatcatggtggttataatattgttatacatcctaattccctcctaaatgactgacaagactaaggcgatgccaagaccgatggcggcggctgtcattgctgccttggacaggcctcccaccccagctaggaggtggccggccatcaggtcacgtaatccgttagtaatggctaccccagggaccagggtcatgacagaacttaagataatgacgtcacggttaactcctagtcctaatgtaacagccagggatgccaaaagacccacaatagaggcagcgatgagttcggcaaagaaagagacattggtgatttgggaaacatactcaaagactgcctgggcaatcccgcccaagacaaaggcgatagggacactaataaagggtccgtcaaacaagaggacaaaggcaccagttcccatggctgagaagaagatagatgtaagtggtttatactcattgacatctagctgcatgcggtagagcatgacccggacttcattggccgacttgggatttttagataagtcacgtgacaattggttgatcatggaaatcatttctaagttggtttctctgtcgctaacccgggctagttgggttacctcatcgtcaaattggtcgcttgcggtaacaatgatagctgttggcaccacaaagacactaacatcattgatgcccaaacttgttccgatccggtagatggtgtcttccacccggtaggtctctgccccattggaaagcatcaatcggcctacttcaacacaaacactgacggattcctttaagtcgttttggattgttgtcacttcactacctccttgtggaaagtctattcgattataaagcaaaagaatggccttttacagaggtaagtgttttcaattataaaaaatattaactttatgtaaaagtcataagaataaaaagttagccagggtcaaatgatcaggcaaaggacgactggcttttggggccagcaattgcatttttctttccattcaaggtatgataagagaaagtaattgtttaaggagattatatatggcagatttcgggtcactttcaaggcaaaaaccaggctggcaaggtcttcaaactaggcttggaaatcttttggcaaagttttttgggcaagcagaccaggttttcaggcaagccaggctagttgttttattaaaagagaaagaggctaaggaatgaaagaccaagacagcaagcagaaaaaaattatcatcctggttgggccaagtgggagtggaaaaaccaccctgggtcgggacttgtcaaagaatggttataaaaaattggtcaccacaaccacccgcaagcccagaccaggggaggtggacggaagagactactactttaaggatgaggccgaccttgatgccagtgactttgtcgagcaaacgatctacaacaaccatacttacggcctgactaaggctgaaattgaggcctccttaaagcagtttgatgtcgttcacgtgtctttagaacgcaatggggctcaggccctgaaggaactgtgccctgagcaggcagtggttatttttattgccatatcggaagaagtcatggctgagcggatgctaaagcggggcgaaagccaggacttggtcgaccaaaggctggactattgccggcggacgggggagctagagccacctagccttgcagattatgtgcttgaaaatcatgacctaaaagagtccttgacccgaatccaagacattattgaaacagaaatataagcaagtttatcccttgctttcaaattacataaaaaagactggctaggatggtcctagccagtcttttgctagctttaaacttaggcttggtcgaagttggaagaggccaagctttcagggatatcaataccagaggcattgtaattttccccattcataatggaatttttcacaataacatagtccactttacggatggcttccaagtccttgccacctgcataagagatagaggactggaggtcttccttcatttcggccagggtatcagcaatatctcccttatacgggaccagcattttcttgccttcgacatttttacgctgacctttctgagtggcagaagcactaccgaagtattccttgtaaagagacccgtcgattttaatcaggtcaccaggcgactggtcgtggccggagaacatggacccgatcatgaccatgctggccccaaagcggatggacttggcaatatcaccattggtccggaccccaccgtcagcaatgaggggcttgcgagctaccttggagcaggtggagacggctgcaagttgccagccaccggtcccaaagcctgtcttgagcttggtggtgcagaccttgcctggaccaatgccaaccttggttgcatcggccccagcgttttccaattcccggactgcttcaggtgtcccgacattccctgcgattaaaaagctgtttggcaggtgttttttaacatgctggatcatttggatgaccatgtcagagtgtccgtgggcgacatcgatggtaatgtattctgggagatcttggtcttttgcgagttgctggacaaaatcatactccccaggcttaacccctaagctgatggaggcaaaaagcccctggtcatgcatacggcggataaaaggctggcgactgtcttcgtcaaaccggtgcatgacatagaaaaagccattttcagctagccaggaagctaagctttcgtcgataacggtttgcatgttggccgggacaaccggtaatttaaaacggcggccacccaggtcgacactggtgtcgcattccgaccggcttttgacaatggacttggcaggtatgagttggatatcttcgtagtcaaaaactttcatattggtatgaaacgctccttatggtttttgagttcaagcgaaaaccgcatgcttcaagctaaagcatacggtaggttgatttctttcccctgtaaatcatacgcaatatactggctaaagtcaaaggcaagctgggactttgtttttaataaattccttaagctagtttggtctttggacttgactctacaataaatcaaaataagggaagttttgaagctaaaactggacaataaaacaaaataaggaagttttgaagctgaaaggcgacaatgggctagccagctcggtcttactgaacctgcatgagaattggggagctcagaatcattcatctttacgaaaagcttgacccttaaaacctgtcttcctctggaaaaagaaaaagctcaccttataacgcatgctatagtgtagaatttacacagagatttaggcttggctatggaagactgaaattccaggtaaatttttttaagaaggcatgatattttgccctaagtcctgtaaaataggtgggtattctattggaaagagtgagtgtatgtcgcgaaaaaaatccagcttttggactcccagaaacacggccctagctgccattatttttgctatcccctttattgtcttggccttcctcttggcctataaccagaccagccttagccaaatagattataatattggcaattacctccatcagttccgatctccagaccggaccaaggtcatcattggcctgaccactattggggacggctggtcgcaaacagtcctgaccctggttattagcctcctcctctttgcccttaaagaatttaaggcaggaatctggtatctcttcaccatgcttgttggggctcagttattgaactcttatgtcaaagacctttttgcaaggacccggccagactacattaaccacctggtatttgaaaattcctatgccttcccgagtggccacgccatggggaccatgatcctctttgccggcctagcctttttagtctaccgactctaccgggcccaccaccccgtctttaagggattggtagtcgtcctttgccttagcttgaccctttctattggcttaagtcggatctatttgggggtccactatccttccgatgtcctagccggttggtccttgggtgctggctttcttttcctatctatcgctgcttttggtctttgggctaccgattaaaagctctctgttaaaatttcaaactaaaagcccctgtccggattcccttctagcatgcggacgggggcctttttaaggttctataatttttagggttggtgggatgggattggcccaccaaccctcttttttaattaaatagggtggtcattaaaaaggtgaccacaccaaagcaaatggcggttaggcccatccccctgatatctttgaccaacaaggataggatgcccaaaataagggcaaggtaaccagcctgggtattttgcaggcccagacctagcaaacctgctataagggccaaccagccgagtatcatccagatatatttcatcctctcacctcttttgttttccttcaagttaagtatacatggagtcccagcagatgaaaagggcttcataacataactttataagtcagcttgcctgccttgtcctttcttagcgggccggctaggtgatacaataggaaggaggaggaagatgtccatgcaaaccctagtcattgtatcccacccagaaattgaagcttccaatagccagcagttcttaaaagaagcggtcgcaaaccaggagggggttagctaccaccacctggagtccgcctatcctgatggccagattgacattaaagctgagcagaacttgctgaaagactttgaccgaattatcttccagttccctttctattggtattccgccccttttatgctcaaaaaatggttggacgaggtgatggaagaaggggtcacctttgggacaggcggggatttactagaggggaaagacttaggcctggtccttgtgattggggtagctgaaaaagaataccaagttggcggccgggagcactttaccatcagtcaattgaccaccccctaccaggccctggcaaataagttaggcatgacctttctcacacccttgtccatcttccagttctactacttatcggataaagagcaaaaggctcttttggttaactacctccaataccttactttaaaagacttttcctcccttcgttccaggacccattggtttatggaccacttggacaaacttgagggtcaagccagtgaggaagccgacaaatttagtctccaaaccattctagattttatagaagacaaccaacttgaacttgatgaaatgcaattgcacttagacaaatagaagtaaggagatcttaaccatgtccgaccaagtcaactggtatttaaaccaactagatgaattaattgaaaaaagtcaagactacaaggaaaaagccatcctggaagggaccaaagacctgatccttgaccaagtccaacgccgccagcaaaatgaaggtgaattggacggttctctttggtccccaggagagtggggttaagtttaaggaacaccttgtagcctcattagactagtgctggctaccaggcaaatggggttagtcagccacgctttcagttcttgttgaccggtaagtcactaaaaattgaatagcttgctaaagccttgtatggcccagctggatattagctgggcttttttggatagtttttgggacttgctttaagggaaaagtctgctaggatagagatatgtataaaaggtattgttaaagaaattcttatatataagctcttgtaagggtttaatcaaaaattggtatagaagaggtgtccaggtttggaacacatagatatgatgataaaagaccgcttccccactgaggctgatgtcattacggaactcatcaaccttcaggccatccagcaattgcccaaagggactgaaatgtacatcagtgatatccacggcgaatttgaatcctttgaccatattttgcggatcgggtcgggaaatgtaaaagaaaaaatcattgacctttttggccagtcttatgatgaagacaaggtcaaccaattggccctgtttgtggcctatccggaatatgccttggaccgtgtccaccaaaaagacctagaggacaaggaccaggttcggaaattaatcgaagacttgatcggggtcttgcgttttgcctcagccaagtatactcggtctaaggtacggaaggccttgccagatgcctatcgctacgtgattgaggaactcttatatgcagactatacccttccccacaagcaggcctatgcctaccaaatcatggaccagattatggccgttgggaagttggaagacttcctaaaacaattgtctttcaccattcaagacctggtcattgaccatatccatattgtgggcgatatttttgaccggggaccggatgctgacaaggtgatggatcggataatggcccttccttctgtcgatatccagtggggcaaccatgacatgatttggattggggcttacctagggtccttgccttgtcttttgaccttactccggatcgccgcccggtataattacctctttgatatcgagcggtcttatgggatcaacctccgccccttgttctcctttgctaagaaatactaccaggccaacccagtttttacccctaagggtttgaccgacaaggagaaggctgagggaacgactgagatggaacaagtccaccaggcactagccatcatccaatttaagttggaagagcaggttatccaccgccggccagaatttgacatggaccaccgtttgttactggaaaatattgacttccaaaatgagaccgtccaggttgaaggacatacttaccccatggtgggttcctgcttccaaacggttgacccggcccatcccaatgccttgattccggaagaagaggaagtggtaggggagttgatttactccttccaaaattccgaaaaaatgaaaagacatatggactttttattgagcaaggggtccaattaccttatttacaacaagcacctcctcttccatgcctgtctgcctcttgaagataatggcgacttcatggcctttaagctaggaggacagtcttttcagggccgggccttgctggactttttcgacgacaagatccaggaggcaggccaagacaaaaattcttacactgacctagcaactgacttgatttggtacctttggtgtgggcctaagtcccctctttttggcaagagtaagatgacaacctttgaaagatactttattgaagacaaggctacccacaaggaagaaaaaaatgcctacttcaagcttagggaccgaaaagaaatagtggaccaggtcttaaaagagtttggcttagaggatgacatttcggctgtcattaatggccacactccagttaaggtaagaaagggggaagaccctattaaggtggaccgtaagttgtttgttatcgacggaggcctttccaaggcttaccaagggtcgactgggattgctggttactccctcttgaataactcctttggctttcaagttgtgacccaccagaccttcacctcggtccaggacttatttaaccggggcagtgacgggtcttacgtcaaacgggtcattgaaagtgagctggaccgggtcaaaattgccgggaccaccattggcagtgacatccaaaagcaaattgacggtctccaagcccatttaaaaaaattctactaaaaaatcagtctctagcaggagttcacaagtcggggcatttgctatgattcctttagtgaaaaccagccaaagtgctggaataagggaaagtaaaggaggcagcaagatggatgccaaatggaaaaagctagccactttcggtctaaccactgggattcttgccttaacgggattaactgtgcaggcccagggggaaattgacaccagtgtggtcgatgaagcctggggcaagcccacttatgtttatgggggaggcctgacttcagaccaggtggatgaaacagcagacttactggggatcgacaaccgggacaatgtcaatgaaagttcagttgaaggtcaagacctgcaaaaatacctcaagcaaggggtggggtcgacctccagtatgatttcgtcggttttggtccaacgccgggctgataataccggagtagaggtcaatattgtcaccccagacaatataacccggatttccgacctccagtatgccaatgctgccatcactgctggtgtagaggatgcccaaattatggtggcagccatccgcccagtgaccggtgaaagtgctctaaccggtgtctacaaggcttttgaactgaatggccaagacctagaaggcgaccggatggaagtggcccaggaagagttggaaacgaccgagcaaatttcaaagggcctggaccaagcagaccaggctaagttaaaccaggccatagctgatatcaagcgggacttggctgaactcaaggaccgggtggatggtcttccaagccaggaagatatccaagaaatcgtcaaccaagccttggccaaccataatttaagccaagttgtcagtccagaacaagtggaccaattaattgtcttgtttgtcaaataccaagaaacctcggccattgattccgaccaagtcctccagcaactagaacgttacagtcaggatttgaaagccaaggccggcgacctcattgaagaagctgaaaaccgaggcatttttgatgccatcagagactttttcagacaattgtggcaggccttgctggacctctttaattaaaagtcatttagccaaaaaaagaccaggctagctgagtgtgctagcctggttctttgtcatggccttatttaaattctttaaagtaggaggtggggtcttggtcggctaggtcccggagcttgttccgactttcttctggcagcgacccaccaaagtccataaattctaccaggtctttgaaggccttgtggggaatagccaagtcatccaacttgtcaaggtcaaggctcaggtcaatgctttcttcttggccagcttctagcttgttgacgaagtcgggttcagtgacaaaggctgacgataggccaaccatatcagcattttccaaggcttggagggccttgtctggggtgttaatgccgccagtggcaataacgggtacccggccgcctatatagtcgtggacgaccttgttgacgtattggccctggtgctggtcggcccgaaccttgttgagataaatgtcatggccccatgaggcgatggcatagtagtggatagttgagacttcctgcatgaggtcaaaatattggttgaattcgtccaccgtatagccaatttgattgccccgggtttcctctggtgtgccccggaaacccagtataaagtctttcttaccagactggtcaatgaccttctggacggcctccatgacttccaccccaaaccgggcccggttctcaacagattgggggccgtattcgtcgtcccgttggttggagaacttggagaagaattgttgggggaggaggcgttgggcgttggaaatttctaccccatcaaagcctgcttcaattgcccgtcttgttgcttgagcatactggttaatgacatggtcaatcttccgcttagacatggctaaaacatcgtgttcaactggagtttttaaatgcatgtagctgggcccgtagaccacaccatagtcttttaaggcgattttggcaaagcggccggcatgggttaattgcaagatggccttggccccgtcttgcttcatggcttcggccagtttggacaggccgtaaacaaaggagtcgtcccggacactggggccgtattcgaagagctgggcatagtcttcgacataggctgctgtggtcacttggagaggggctgacttgctgcggcgtttggcataggcagtttcttcctccgtcacatagccttctttggaagaggcattggtggtgatagggttaagggaaaaacgattggctaacttgatgccatttgggagttcaatggctcggaacaaggggtcatatttgcttttattcttttgagtcatgctattcctcctagttgatttcgtccatgttcactataacacatattttataaaataaagaataggacctagacgttagtgttttgctaatgcaacttagtgtaaagttactttaaatttttcttgaaagtacgttatttttttgctaatatgtgaatataataacaaatgaaaaaggaggctttaaatgaatttaacacccataattggttattaagtggcgatattatactagagtttactaatgaggaggaatacaagaatgtttgatattgagcaattagatcaacaagaacaatacggagcagttgctaccactgctttactgattgctggtggttttttaactggtggcggattagcatggatagctaactagcgttttgtaaagggcgaatggatattaatcaagtaatttaaaacattatttatctaggagggaaagatttgacttttgatattgaacagttagaccaacaaaatcaacctgtggcacttagcacagccatagctgctggaggagtgtttgtaactgctgcaggtttaggatacaactttgtttctgatttaatgaattaaggtaaagtaaagcgaactctcggtaaaaagagtagattttagaatctgctctttttatcaggataaggagatggaatactggataatcaagtatttaatcagttaaggaagctagaaattaccgggccctttcaaaaagagaatatagaaaagaaatattacatattaaaaaatgttgagacaaatttgttttttgaacttggagaaaaagaggctatattgttgaaattgcttcaggacaatgaaataaaaaaagcaaaagaattttctgtcacaaattttggacaaaatgtagtggatcaatttatcaaggaattatataagaataacatcctacaaagggggtccaagcccacaactccgagtcaaagtaatgatattgaatgtgtattaccgtttatatcatatataattaataatatacctataaaaaatacctactcattaataatatattatgtcttaattattgtattttctggtgggggtttaatagcgtttggaagtagtttaaataaattcgaaatgaatgctagtaaagtcaacggattaaacttgatagtgttattggtactttttcttgtaacaatatttatacatgaactgggacatgcaattaggctgagattagcggataaaagtattggtgatattaagttattcgctaatttttatccaataaagttaggcatgcaaattgacacttctgaatcgtatatgttggaaagaaaaaaagacaaaatttctgtggctttgggtggagtatatgcccagctagcttttaatggaatagttgcattagttctttatatgatgaatgtagaagtttttgatactacatttatatttgttttatatactgtaggtaattggattattattatttcgaatttaattccctttatgaaattggatggatattggattttatcacattatcttggtatcaataatttaagtgacaaatctgtaaacatgttaaaagattttataagaataaattttcttggtgctagagaaccaatatatcgtaattatcaagatgagggaatggaaagacataaattcttttatagtacatatggatttttgtatttaattttcaacccagtaagtagtttagctttgttgggattattagtctatattagtgatagtattgtaatcttcattatattgtgtgttggtatagtaagggttatttatatgggcataaaatttatatataaattaatataattaggaatggagatgggcaattgagttatatagaagttgattctataacaaaaaaatattcagatgtaattgctttgaataatgtatcattttcgattcaaaagggggaattattttgtttgcttggtgagaatggagctggaaaaacaacacttataagaattttatcaacactagttaagccaactgatgggaaagtttttattaaaaaccaaaaaaatatatataacaataggcttatcaaaaggtatttagggactgtcacggatagtgcaaaaccctatcctaacttgacagtgaaagaaaatattgattttttttcactaatgtattccaacaatgctggagttaaaaatgatcgtactgaagcattaattaatctacttgaattggaggagtataccgacaaaaaagtagatttattgagtaaggggaataagcaaaaagtggccatagccaaagctttatgtggtgaacctgagatattaatatttgatgaacccatgagtggattggatgtgggtacccagaagactattagaggcttaatgtctaggcttcaaaaaaatgggaaaacaataatattttcttctcataatatggaggaagtcagaaaaatagcagatagaatttgtattctcaataaaggtagcattgtctacgatggttatttaagtgatataaaaaatgaagagcgggtgacttatttagaaaatatgttaacaagaaaggattgaattttttgttattactgaagactttatttaaaaaagagatgatgcagtattttaggaattggaaatcatggggggtaatgttacttctacctttagtttttataccagcagcaattatagcacccatgcttatatctaataatagggctgagaacgtatataatatttattttgaagaaaatataaatgaaaaagacagtattcttgaggagttaattcaaaagaacgacaactttactatcgtcagtgatgaagaaaattttgatctgaaaatttctaagttagatcaaaatgaaataaatgttgagtataaaagcgatgaaaatgattcaaatgaagctttattggcgctgaataccttattgatgtcattatcaaatcaaaaaatggctcaagaactggaaatgaataatattgattcaagtagttataatataaatttaaatgtaactgatattgcagaagtaaagggaagtcaaggagatcaatttattgcttttatgctaccacttgtactttcattaatgattgcaatgggcccacttgctcatggggctagtgtagtagctggagagaaagaaaagggtacaattgaatcctcattaatgctacctgttaaaagagtggtattattattagtgaagtttgctagtgtctttttatcgagtatcttcatgacaattgccactttaattggaattacaggagctgtattggccgttaataagcttaccgatataagtataaacctatattcggaacattatttatatatgattttaataggcatagtaggttctctactattttcttcaatttatattggaattagtattatcgcaaagggaactgaagaggcaaacaactatgtaacgattgtaagtttagtagctgcttctctgatggtagtaggaggaatgacgttagaaaaaccaggaatatattatactccttttgtaaatatgcatgcaattttgtctgatgcttttactttgggtgagaatgttgcaatggttcatattggtttggtaatattgaccaatttaatctttacaattatatgcctaattgtagatgagtttctattaaatagggaagatgttgtacttggtaaatagtaaaaagtataactaaattgctgtcaaactatgttttttaattggttgaatttactagcacgattgctaatagtttttcagggaaaagtacattattccttaaatcactagttttttttagtggtacatgcttattagacaagtgaatttctcgcaaattcttgtagacgatatttgtaagagaaatcacttgtttttatatacaaaaagattaaacaatgatgatcaaagtgagtgtaccgtcaacctcataagttgttttttacttattaggatctagcccaataattctgcctttgtgcatatgagctacttgaacgattgttgtcagttgaggaatattttaatggttttaataactatagttaatagcatgcatatgctaggttaagcaaatgctatcaaataaagggtcttgttcaattacttgtcatgttattgaggaaagcttgaacctcccctccgtcaggttagtaaagaagtcaagcatttgttataatgttaacagattaagcaagtcctgccctgactggcttcaagcaagagtcagcttgtgtggggaaggcatgcgctaagggcctaagagttttaagatagttcacaaaatcatgaactagccttttcagtagcttaaccagcccagtgtaaacttaggctcaatgaaacaaaattgtatctataaccagttgatactatctgttaaggagcgaaatgatggaagatgctgtcctagctgataaattagatggtctaatcgccactttagctaaagaaaatccggtcttagagtccaagttctcaacctaccctcaccgggacttggacgacaaatttcaactttaccgggctttttgcaatgaacgccagcccagaccggtcagtgaccaatttgtccaagaagaagccgaggttctaaaagaagtggctaagcgtaagggcaaggttagcctagaagatataaaacaagcaggtggccaactagatgaccaagtctatttatggcagggggatattacccgcctagccttagatgggatcgtcaatgcggccaacagctatcttttgggttgtaccctggccaaccacaactgtattgataatgccatccatacccaggcaggagtccggctcagactggcctgctatgacttgatgctagaccaaggacgcaaggaagcagcaggcaaggccaagatcaccccagcttttaacctgcccagtaaggctgtcctccacacagtaggcccttatattgaccaaaggggagttacacccttaaaagaaagactcttagccagttcttaccggacttgcctccaagtggctgaggccaaccagctgaaagaactggccttctgctcgatttcaaccggggaattcaactaccccaaagaccaggctgcccagctagccagccaggtggtcaaggattacttggctgaaagtgctagtgagataaatattgtattcaacgtctttcaagatgaagatgccaagctctaccgtgatatttggcaataaagtgaacaaagaggagatggaccaagtgacggaaacaggtatttggacaggtttagaccaggcgagtagccaggccagccaattaggccagctaattgaccaggcagatgctatcctggtcggagctggcgctggcttgtcagcggctgccggctttacctattcgggcgaccgctttagccaggcctttcccgattttatcgccaagtataactattttgacatgctccaggccttccttgatgactatgaagacttgagggaatattgggcctttcaaagtcgctttgccttgctcaattattttgaccaggcagttggtcaggcctatttagatttaaaagacatcttagaagagaaagactaccatgtgctgaccaccaatgctgacaatgcctttgaggcaggaggttttgatatggacaaggttttccgcatccagggggaatacggcttgtggcagtgcagtcgtttttgccaccaacagacctaccaggatgaggccttgacccggcaaatggtggaccaacaagaagacatgaaggtgccagaagacctcattccttactgccctaaatgtggggctcctttggaagtcaacaaacgggatgcagtccacggcatggtggaagactcaaactggcaccagcaggaagagcgttaccgtgcctttttgaagggccaccaggaggggaaaatattatacttagagatcggcgtaggggtcactacacctcaatttatccgggaacccttccaagatttgaccagccagaacccccaagccctttatgtgaccatgaaccagagaccctaccggataggtcaaaaagtcaaggggcaggctgtccggattaccgatgatattagtcaagtcttgcacacgatttccaatagataggagttagatgaatgtatttaattgaaccaatccgcaatggggaatgggtttatgaccaaggcacggccatggcgatccaggcttacatccgggatgaagttttcttaggggaggacatcatcttcccttacctggtcaacccttccatccagcttggtgtcaaccaaaatgcctatgaagagattaaccagccctttatggacgaaaacgatatcggactggtcagacgagacactggtggcggcgccatttacctagatgaccggaatatgagttattgctacttgattagtacagataatgctaatgatgtttacggcaacttcaaaaaattgtatgaccccattatccgggtattaaaaaacatgggtgtggaaggcctagaacaaaaaggccgaaatgacttaaccttaaatggccggaaaatttctggcgctgccatgactgtggtccacggccggatttatgcgggttattcgcttttgattgaccccaattatgaggtgatggacattgcccttaaccccaacagtaaaaagatttcttcccatggagttaagtcagtccggtcccgggtcggcacccttcgtgatgcgctggatgacaagtacaaggatattaccgtttgggaattttccgatgaaatcctcaaggaactcttggacgttgacgacttggaccaggccaaacgctatgaactgaccgaagaggactgggcggccattgataaaatagctgctgaccactacaacaactgggattggaactacggccacttccgggagttcgagtaccaggtggatgaacgctttgaaggggtcgggaccctccacatcggtttagaaattaaacatgctcgaattgacgatatccagattaacggggactttttcagtgtggaacccaaggaagacttggaagcaatcttcaagggtgttcgcctagacaagactgccctccaccaagttctcgatgaagtagatgttagccagtatatcaataatatggaccaagacaccttgataaactttattttagaaatcccacaagataaggactaaagaaaggatttaggaggatcgtatggttgacttaggtatcttagactatgcacaaatcaatgaagggaaaaatcccagccaggccttggaagagacggtcagcctggcccaatacagtgaagaattaggctacaaacgcttctgggtggctgaacaccacaatgttcccgcctttgcttcctcctctccggaagtgattatgatgcatctcttggacaagactaaggaaatccggatcgggtcaggtggggttatgttgccccactactccccgcttaaggtagctgaaaactttaagatcttagaagcctttcacccaggccgggttgatcttggagttgggaatacagaagggacaaaaccagtatatgatgccttaaatgaacggaaaacggtcgactttgattatgaagcagccatcaaagatattcaaggttacttgactagcctaccggaagaccaccgacacaaacgggtcactgctaaccccaatatcgaccgggcaccccaaatgtgggtcctttcttccagtgtcaaaagtgctcggatggcggcccggctcggcctaggctatgcatttggcattttcccttatccaagaaataaccggatggaagtcggcaaggaagcttgccaggtttaccgggaagagttccaaccttcagccttcctcaaagaacccaaagtaacggtcgctcccttcctaacagtggcagaagaccaggccttggccttagcctatgcggaagccttggacttgtggttgcttggtaaggacaattttggtgacctagaccacttcccttcagtggaaacagcccgccaatatgactactctaaaggagaagccaagattgtagaacggaaccggacccggatggtagttggggaggttaatgaagtagccgaccagctccaagacatcgcccagaccatgcaggcagatgaactcctcttaatcccccttatgccatctatcgaagctcggaaagaagcccttaaactcttagctgataaatttatttcttaatttgatctgaaacaaaaagccctggaccaggctcagcctggtccagggcttttaaggtaaggagtgggaggttatagtggttctattcataaaagaaaaaaggctaaaacatcaaataaaaaatgacgctggtgaatccctcaccaacgtcaaatgttgtagaaccatattaatttagttagttaggttgacgatgaagtattttttcttaccacggcggaccacaataaaacggttgtcgaaagaatctgcctgactaatagtgtaatttctatcctggatgcgctggcccttgatggtaatggccccattgtccaggaattcccgggcttggcggcgggattggacaataccggtgatgtcaactaagaattcaacgatgtcatgttctcctctcggtgctgttgaggtcggcacgtcttgtaaaccgctagctacctggtcggccgataagtcggcaatgtcgcctgagaagagggcctggctaatttcttgggcttcttcaagggcttggtcgccgtggacaaaccgggtcatgtcttcagccaaggctttttgggccttgcgtaagtggggttctttttctaaactttcttggagttcttgaatttcttcctggttaaagaaggtaaagtatttcaagtatttgataacatcctcgtctcgttggttgagccagaattggtagaattcataagggctggtcttgtccgggtctaaccaaacagccccgccttcagttttcccaaacttggtcccgtcagccttgagcaataaggggatcgtcaaaccaaaggccttggcatctggcccttcttttttacggataaggtcaagaccagctgtgatattgccccattggtcggctcctcctacttgcaattggactccttcatgttggtagaggtggaggaagtcaatggactggatgatttggtagctaaattcggcgaaagaaatgccggcttccaaacggttagctacaatatctttcgctagcatggtgttgatgttaaattcttttccgtagtcccttaaaaagtctaagaaagacaagggtcccaaccaatcggcattgttagccaaccggataccagattggtcctggccagcttgaaagaggtctttcatttgcccgctgagtttttcaacattatgttggacttggtctttactttggagttggcgttccgactttttgccactggggtcgccaatggatcctgttccgccaccaattaagacaactggtttgtggccagctttttggaaacgtttaaggatgataaaggggatgaggtggccgatatgcatactgtcgccagttgggtccaccccacagtagagggcgatggactggttttcgaccaattctcttaagccttctgcatccgtttgttggttaatggctccccgccattctagttcatcgataatattcatttactttcctcccagttctttttgaaaatgtttactttaatatcttaaatgaggtataaaaaaagcccgctaacaagtttcaaatcacttgctagggacggacaaaagccgtggtaccacccaggtttaggttatagcaaccatgctcaaagtgctaacgctatctagcgcttatgctcgattaaaaaggtgtaattcattgaaggggcttgcgcaattctcaccaccactgcgtctctatacaagcctagcttcaactactgggccttggcataatgatatatggatttagtataggtgtaagcaagatgcttgtcaaggctcaaacaaggctaggggcttattcgtgagatattttacataaaattaacctataagttaagcgagtatagtagaatgaaagggagactgataaagggtgtggatggattggagaaaattgtcttttttgatgtagatggaaccttactggccaaaaatgggaaaataccctcttcgacccaacaagccattgctaagctaaaagaggagggggtcttgccggtgattgcaacaggccggtctcctttattgcttgaaggggtggcccaagtcttggacatcgacagctatattgccatgaatggccaatatattgtcttggaaggggaacttttttatcacaaccccatagctcctgacctattagaccgctttacccaatatgctaaggaggcgggtgacggctatgtgctctgcggcagtgacgaaatctatactgggacctccatggacaaggaaagcaagcgttaccgctttttgaaatacttggctagcattgtcccccaaaacctgcagctgtcctttatgaagcgggccatgaaaaagtacccggatcccttagcctaccaggataagcctgtctaccaggctatattgcaggccccagcaaactcagaaattaattatatcgaaaattttcccggcctccgctttacccggtctaaccccatcatgtttgacgtgatcaagaacgggacttccaaagcaaccggaatccaacgtattgctgaccactaccaggtggacttagaccaaacctatgctttcggggaccacttaaatgatattgaaatgctacaattggtgggtcatggggtggccatggggaatgccttagacgaggtcaagtcgatttcagaccgggtcaccctggaagtggaccagggtgggatctaccatggcttgttggacttgggtattattgacccgctttagtataggactaggccaagaactaagccctggtaaaccaaggctataatagaggtctaggtccggcttgcaagcaaccggtttccaaactcttttatatgggagccaggtaagctggtctcatcattcaaccgacatttttcatgctaacctaaactttttaatgccaaatcctataaagtccccagtctatatgctatacttttatactgtatagtaggttagacctgttataggttcaatattctgaaggaggcggctcatttgtcagctgaaaatagtttttatataacaactccaattttttatccgagtggtaacctgcatatcgggaatacatataccactgtggcttgtgatgttattagccggtataaaagattgcaaggatttgacacccactttttaacaggaacagacgaacacggtcaaaaaattgaacagaaggccgaagaaagcggtaaaaccccccaggaatatgtcgatgagatggcagactatatccaaaatctctggtcctacctccacatctccaatgaccaatttatccggactacagatgattaccacaaaaaaatcgttgccaagatcttcgacaagttatatgagcagggggatatctaccttggagagtatgctggttggtattccgtatccgatgaagaatactttaccgaaaaccagctagaagaagtctacaaggatgaccaaggcaaggtcattggaggtaaggctccaagtggccacgaagttgaatgggttaaggaagaatcttacttctttaaaatgagcaagtacagtgaccgcttgctccaatactatgaagacaatcctggctttatccaacctgaaagccggaaaaaagaaatgatcaacaactttatcaaacctggactagaagacctagctgttacccggactacctttgactgggggattccggttaatgctgaccccaaacacgtggtctacgtttggatcgatgccttgtctaactatattacagcactaggctatgatccagaccttggtggctttgaccagcaaccagaccagtttaaaaaatactggccagcagacatccacatggtaggcaaagagattgtccgcttccacaccatttattggccgattatgctcatggccctggacctacctcttcctaagcgaatatatggccacggttggttactgatgaaagatggtaaaatgtccaagtctaaaggtaatgtcgtctatcctgaattcttggttgacgaatacggcttagatcccttgcgctactactttgtccgcgaagttcctttcggtagtgacggggtctttacaccagaagactttatcaaccggattaactatgacctggctaacgaccttggcaacctggttaaccggacagtttcgatgattaacaaatactttgacggtaaggtaccagcttatgttggcccagtaactgactatgatgaaccactggccaaactggctgaagaaaccatccaggattataagaaaaaaatggatgacctccaatttaaccgggccgtttcatcggtatggaacttgatctctcgcaccaacaagtacattgaccaaaccgaaccatggctattggctaaagatgaatccaaacagaaagaacttgcttcagtcatgacccacctagtcctgtcactgagagtggtggctaacttgctccaacctattttaattgaaagctccggtaaaattttagaccagttgggcctaagtaaactaggggaacaagactggaaggacctccactttgatgtcgacctagctggtgtccaagttgcttcaaaaggtcagccaatcttcccacgacttgacttggaccaagaagtggctaagatcaaaaaggccatggaagagggcaagggcaagtctaaggctggtgaagaagataaagaccaatgggaaccggaaaaaatccctctcagcttggaccgggatgaaatcgacttcgaccaatttatgaaggtggaaataagagctgctgaagtcatcgatgttgaacccgttgccaagtcagacaagctcttaaaattccgcttggatgctggagatcaagggggcaaccgtcaaattgtctcaggcctccgcgagttctacccggactataaggaattggtcgggaaaaaagttgccatcgttgctaacttaaaagcccgtaaaatggttggggaaatcagccaaggcatgatactgtcagccgaagatagacaagggagcttgaccgtggctgaattgccaagccaaattgaaaatggggctgacttatcctaagctaaccgggcattcaatttaatcgtcaccaggctgagcgaagtcctggcatttaaggtctacctacaagtgagtaggtagaccttaaacattgtgcctggtacttttaggagaaaagtgtgactataatgtagttttagcgattgccatgtcgttattttttaagtatactagaaaaaagaggtggaaagatcatgtataaaaggacaaaaacaagtttattgatagcctttacctttattattagtttatttatcggctttggctcaccaagtcaagaagtccaagcccaggataaagtttatgaaatagccaccgatacgacttatgcccccttcgttttccaagagggtgacgactatgtcggtattgatgtggatattttggacgctgtcgccagagaccaaggctttgaatacgaattgaatcccctaggctttaatgcggccttgcaaggcctggaagccaaacaggtagatggtgtgatcgcagggatggggattacagaagagcggaaagagtcctttgacttttccgaaccttactatgaagcagggaccgtctatggcgttgaagccgacagtgagtatgaatctttagaagatttagaaggcgaagttgttgccatcaagaccgggacacacggagctgatgtagccaaatccatgcaagacgactatggctttacaaccagggaatttgaagactcagtcaacatgtacaacgatgtgatggctggcaatgcagcagctgccatcgaagataccccagtcatgtcctatgctattgagacaggccaggtcaacttcagggtgatttccgatgatattgaccggacttcttacggttttgcagtccaaaaaggtgagaatgcggaattgctagacatgttcaaccaaggtctggccaatatcaaagaatcgggagaatatgacgaaattgtccagcgatacgtcggtgaagaagcgattgatagccagcaaacggaaagcggcattttaggccagctgtctgcaaacctcagtaacctgctagggggcttgtggaccaccattagtgtaacagcaatttcgattgtcctagcccttatcctaggggttgttttaggcttgatgcggaccagcgacaacaaggctttagacctgattggtttggtttacatcgatattatgcggggaattcccatgatcgtcttggccttctttgtttacttcggtattccccaattatttaatatcaacctttccgccttccaggctggtgtcattaccttgagtattaacgccggggcttatatcggtgaaattattcggggtggtattaatgctgttgacattggtcagaaagaagccagtcggtcactgggcttaccccaagggaagaccatgcggtatgttattttaccccaagctgttaaaataatggtgccctctttaattaaccaattaatcatgaccttgaaagattcgtctattctctctgtgatcggcttagtcgagctgacccaaactggtcggattatcatcgcccgaacctaccagcccggatccatgtggctgattgttggggccatgtacgttatcttgatcaccattttagccaaactttcgaactacctggaaaggaagtggattaaataatggccaataaagttgaagttcgccagttaaagaaattttttggcgataatgaagtcctaaaatccattgacctagatgttaaagaaggtgaagtggtgtgcattatcggcccatctggttctggtaagtccaccctgctccgctgtttaaaccgtttagaggaaatacaagctgggtctgtcgtcatcaatggcaaaaaaatatcggaagccaaggatattgataaaattagacaaactattggcatggtcttccagcactttaacctcttcccccacttatccgtcagggaaaacatcaccctagccccagtcaagctaggtaaattatctaaggcagaagccgatgaaaccgctaaacgtcttctagatcaagtgggcttggctgacaagttagaagcctatcctgcttccctttcagggggccaaaaacaacgggtggccatcgcccgggccttagccatgaatccagaaatcatgctcttcgatgaaccaacctcagcccttgacccggaaatggttggtgaggtcttaaaagttatgaaagacctgaccaagcaagggatgaccatggtggtggtcacccatgagatgggatttgcctctgaggtggctgaccgggtagtcttgatggatgggggctatgtggtggaagtcaacaccccagacctcctcttcaatgaccctcaagaagagcggtccaaagactttctgaataaaattttataatccaatccatgaactaaaaagctaggatcagttgaccctggctttttttatgtgcccaaaaacttattctgctaaaatatcctagaaaaacttaaaagtcctagaaaaacattttagaaattggtaaaatatagtgagataagtgaagttttcctaagatagaaaatgcgaaatcgtataaaggagattgttatgctctttgacagccatacccatattaatgatgagcaattttcacaagacttagaccaagttatggccagggctaaagacatgggggttagccggatgtccgtagtcggttttgactaccctagtatcgaaaaagccttggcgttaagccaggaatacccccaagtctatcctaccattggctggcatccaactgaggccggctcttacaatgaagaggtggaaggctacctccagcagatttatgaaagtggccaggctgtagcggtaggggaaactggtttggactaccattggatggacgatcccaaagaggtccaattccatgtcttccgtcgccagatccaactggccaaggattatgagcttcccgtgaccgttcacaaccgggagtcgaccaaggatgtctaccggatcttggaagaagaaggtctgcctcaagctggcttgattatgcatagtttcaatgtttccacccgctggcttaagcgttttgttaaactcggcgccatgatttccatttctggggtagtgacctttaaaaatgccccagaagtcagagatattgctcaagccacccccctagaccgcttaatggtggagacggatgctccttacctcagtccggaacctaatcggggtaagcggaatgaaccaggatatgtccgttttgttgcggaagaaattgccaaagtaaaaggcttgactgtccaagagttagcacaagtcacttatgataatgctaaccggattttcaaactaaatgaatagtaaagtggggaagggccatgaaaaccattaaggaagttatcgttgttgaggggaaagcagacagtcgccggatcaaagaagtagttagggctgataccattgaaacgaatggctcagctatcgatgacaagattatagatcaaattaggcatgcccaggaaaaaagaggagtcatcattttcactgaccctgatttttcgggagagcagatacggaagattatttcacgccaagtgcccggggtcaaacacgcttttttgtcccaagaggaagccaagcacaagagtcagttgggagacgatagccatgtccctatgagtagctacaagcattctttggggattgaacatgcctccaatgaagctattgagactgccctaggtcaaaagtacactgagcagattggccaaaagcctcctaaaataaccatggcctggttgcgccagcaaggtttggtcgatggggaaaactcggctcatttacggagcctattgggagacaagttgcggatcggctataccaatgccaagcaactgcaaaagcggctagccctctttcacatcaaccaagaacaagttatccgggccttagaagaagtgaaaaaagactagtaagtgtttgaaaggaaagagttcatgcctcacagcgatattgccagtcccagtcgcacaattgaaattcaaaagaaatatggcctccaagccaagaaaagcttgggccagaattttatcatcgatagtaatattctgcaaaagatggttgactctgctggagttgacaaggatacggtggtcattgaagtcgggccaggtattggtgctttgactgaacaagtggctaggctagccaaagcagtttactcctttgagattgaccaaaggctcctgcctgtcttagaggatagtctggctccttacaaaaatatttccatcatcaaccaggatattctccaagtcgatttgggtcagttttgcagagaccaagatattgaccgagaccgcttggtagtcatggccaaccttccctactacattaccactcctatcattatgcacttcctccaagcccccttaaaattggactatttagcttttatggttcaaaaagaagtcggtcaaagaattgtagctggtcctggcaccaaggcatatgggtccttgtcgattgcggttcaatactatgcccaggcccatattttgtttcaagtgccgaagactgttttccggccccagcccaaggtggattctgcagttattggcctggatattttagaccagcccagtgtttcggtagaagatgaagcctttttcttccaggtcgcccgggcctcctttgcccagcgccggaagaccttgtggaacaatctcagggcccactttggtaaggacaagcaagttcaagccaaggtccaagtcgccctcagtcaagctggtattgacccaggacttaggggcgaggcactgggattagcagactttgctcgtttgacgactgccctaagtgaccagggtttaaaggaagtcagtcactagggcgggataactaataccctagcttatcattaaagcgagcaccaagaaggacagtggttttgaccttactggtttaaggggatcactatttttggaagcaacgattgaaagttgcttcttttttatagaataaatttagtaagtatatgggttagatctagcttgtttcaaaaataacgagataaaaatattgttttattttctaaaaaaaggggctatgagaagaaatgttattctcaaacagggacgcttgtttgagaaatttgtttgtttttcaaacaacaactgttcttttagaatttcagcagatttttctcaaacaacttaaattattcgataatttgatagtatttttcttaaacaagattagttatgttgaaaggcgacaaccgggtatccataaggtattttgagatttgaaactggaaaataaataaaaatatggaagttttgaagttaaaactggataataaatcataatacggtggtttcgacgtaaagtccacatctctgcataagtcagtttatagttaatgactaagcagtgaaaatgggatccaagtatttttttacaataaacataaaacttattcaaaactggcccaccatatttgcgactagaaaaaaagatgattgacaggtagggaaagtggtgtataatgaaaatcgtagtgattacgaatgagaatggttacgatttaaattttcaagcaaaaggagaaggaaaatgaagaaaaagatcttgagaatgtcgacttacttagtaacagccagcttattagctgcttgtagtccaggcgggcaagaaaaccaatctggccaagaccaagctcaggctgaccaagaccaggaccagctccaggtaacggcttcctttttcccggtctatgaatttgcacgagaggtagctggtgaccgggcccaggtagatatgattttatcctccaaccaggatgcccatagctttgagcctagtcctcaagacatagcccaggtggaccagtctgatgtctttgtctacagcagtgatgaaatggaattttgggctggagacttgcttgaggctgttgagaatgaagacttagttgtggcaaaagccatcgatggaatggccggggacttagctagcggtcatgaccatgaacacgatgaagacgaccacgaccatgaacatgatgaaaatgaccacgatcatgatcacggtgcagaatcggatgactttatcggcttggctggccactaccatacgggtgatacggcaggcttgcaagccaatgtcgacactgaccaagatgtcacttggtttgttgaacaagacggccaagtgatcgaagaagagaccttggctcacgatgaaacctttgaatattctatagaagatacagttgaagtctactaccaagtggatggagaagaatcggaccgggttgagcttcatgttgacaaccatggaggggatggccacgatcatgatcacgacgaagacgatcatgaccacgacgaagatgaccacgaccatgatgaagacgatcatgaccacgacgaagatggccacgaccacgacgaagacgatcatgaccatgatgaccacgatcatgatgaggatgatcatgaccacgacgaagatgaccacgatcatgatcacgacgaagacgatcatgaccacgacgatgaccaagatgaagaatcaaacgactttattggtttagctggtcattaccacactggtgatacagcaagcttgcaggccaatactgaatcagaccaagatgttacttggtttgtcgaacaagatggtcaagtgatcgaagaagaaaccctggctcacgatgaggcctttgagcatacactagaagattcagtagaagtatactatcaagtagatggggaagaatcggaccgggttgaactccatgtggatgatcacgaagacttggacccccacatttggttagacccagtttatgctcaagaccaggtcaatgctatccgggatgctttcattgaagctgaccctgaaggggaagaagtctacacccaaaatgcagcggactttaacaaacagttggaagaactccaccaagaatacagccagacctttgaaaatgctgaaaatcgaaactttgttgtccagcacgaggcctttggttacctagccaaccgttacgacttaaaccaggtttcgattggtggattgtcaactgaagtggaaccttctccagctcgtattgctgaagttggggacttggtggaggaataccaagtgccggtgatctactatcaagaaggagctgactcttcagctgcccaaactgtcgccgatgaaacaggaacagatattgccgagctttacgacttggaaatcttatcggatgaaatgcaagcggaaaacttgtcctaccttgatgttatggaacgaaacttggaacagttgaagttgagtatccagtaagtttttctggattgttaaatggtggcctttcagctagaataatagggcggatttatagatataaaataggaaggacggatgctatggaatatatcagggttgaccagcttgcttttcgctacggagatgaacctgttttgcaaaatatttcatttactgtcaatagcggtgagtttgttattttgacaggagaaaacggggcagccaaaaccaccctcttgagaaatatcctaggcttactcagtccttcagaaggccaagttcaattagctgaccgtaaccgctggggtgaaaagctggtggtgggctacgtcccccaaactgtcgcttcctttaacgcgggttttcccagtaccgttttggaactcgttcggtcgggccgctatccgagagggcgatggtttaaacccttgaccaaagaagaccatgaccacgttgaaaaatctctcaagtctgtaggcatgtgggaccagcgccataaaaaaataggtgccttatccgggggacaaaagcagcggatttccttagcacgagtttttgccacagaccctgacctatttgttttggacgagccgactgttggtatggacactgactcccgcaaacagttccaccaattgttgaaacacaataccgaagtccatggcaaggctatcatcatggtgacccatgactatgaagacttgaaaaattatgccgacaagcatattgaactagtgcggaaggaggattcaccttggagatgtttctctatggattcatgcaaagagccttccaagcttcaatcctgatttccttgattgcccccgtcctaggcttgtttctgattctccgccggcaatccttgctggctgacaccctatcccatgtctcccttgtcggtattgccttaggatttctgatcggccaaaatccaaccttgatgaacatgattgtggtggttttagcagccatgcttttggaatacttaaggtctctctaccggtcttattcggaagtctcgattgccattttaatgtctggtggcatggccctggccctggtcatgatgaccctaaccaataattcggacatgatgtccatcgacaccttcttgtttgggtctattgtcaccgtcagccagtcccaagtctatttgcttttagctattaccttggcagtcttaatcctttatttaatcttccgtaagcccatgtacatccttacctttgatgaagaaacagcctatactctaggcttgccagtcaaattaatgtccattttgttcaatgtcttaacagggatcaccatagcggttatcatgccgattatgggggccttgctggtttcggcggttttaattctaccggccgctatctctatgcgactgtccaaaagcttcaaaggagttatttttatcggcatcctcctaggcttggttgcgacaacagggggcttgatcttctcctacctatacgggacgcctccaggagccaccattaccctgattttgatcttggtctttgccttggtttctttaatcaagtctaaagactaggtgctatttccaagctaactataatttttttaaagcacacctagcctctatttcaaggggttaggtgtgcttttgtagccctgcttttgctataatagatcataatgctcattaatatttagtgttaggattgattttatggaaaaagttctcgttgctaaccgaggtgaaattgccattcgaatctttcgcgccctgagtgaactggggcttgcgacagttgctatctatgcccaagaagatgaggggagcgttcaccgctttaaagcagacgaagcttaccttattggtgagaacaaaaaacccattgatgcttacttagatattgaaggaatcattcatgtggccaaagattgtggggcggacggtatccatccgggttatggttttctatccgaaaatttggaatttgccaagcgttgccaggaggaaggcattacctttattggtccaagagtcgaacacctggacatgtttggtgacaaactgaaggccaaggcagtagctcaagaagctggcattcccactattcctggctctgacggtccagttgaagatagtcaattggcggtcgattttgctaaccaagctggctacccgattatcatgaaggctgccctgggtggtggcggtcggggaatgcgggttgcccacgatgaagccgaaatcagagaagagtttggtagagcccagtcagaagctcgtgctgcttttggccggggtgatgtctatgtcgaacgttacttagaaaaccctaaacacattgaagtccaaattttaggtgatcaaaacggcaatgtcgttcatttatttgaacgggactgttccatccaacggcgccaccagaaggttgttgaaattgctccttcagtgaccttgtctgaccaggtccgccagcgtatttgtgatgcagctgttcagttagctcaacatgtaggatacttaaatgcaggaacggttgagtttttggttgaaggggaagaattctttttcatcgaagtcaaccccagagtccaagtggaacacaccattacagaaatgattacggatatcgatattgttcaaagccaggtcttaatcgctagtggcttagacctccaccaggatatagatatcccccaacaagaagagattaaaacgaacggctattccatccagtgccgaattacgacagaagatcccttaaataacttttatccagatacaggtaaggttaatacttaccggtcaccaggtggttttggggtaaggctggatgctggcaatggtttcaccggaacggtcgtgacccctttcttcgactcccttttggttaaggccattgtccatgcccgcagctttaccaaggccagccaaaaaatggagcgggttttgcgggagttccgtatccgtggtgtcaagacgaacattcctttcctagccaatgtcgtccgccacccccgtttccaaacaggggacttctcaaccaattttattgatactacaccggaattatttgagtttcccaaagagcggaaccgggggaacaaggccctccgctttatttcagatgtgacggtcaatgcctatcctggtgtggggaatgtggaaaagccccgccttctcaaaccaaagacgccaagcaagttggaagttgtagaccaagctagtccaagctacaagcaagtcttagaccaagaaggccctgaagctgtagcagacagggtcaaggctgaagacaacttgcttttgaccgataccaccttccgggatgcccaccagagtcttcttgctacccgcatgcggtcttacgatatgtttaacatagcccaagagactgaacaagccctgcctcaaattttctcccacgagatgtggggtggggccacctttgatgtagcctaccggtttttgtccgaaagtccgtggaagcgactcaaaaaaatgcggcaactcatgcctaacaccctcttccaaatgctctttagggggtccaatggggtaggctactctgccatgccagacaatgtattggaggaatttattggcctagctgctaagaatggcatcgatattttccgtgtatttgacagcttgaactgggtcccacaaatggaaaaaagtatccaatacgtcagggacaacaacaagattgctgaagctgctatctgctatactggtgacctcaaccatgagggagaaagtaagtataccttagaatactacaaaaacttggccattgaactggaaaaactgggggcccacatcattgccattaaggatatggccggcctgctcaaaccctttgctgcctatcgtttggtctctaccctcaaagaggcagtggacctgcctatccacctccacatgcatgacaccagtggcaatgggatctacagttatgcggcagctacccgggctggtgtggatattgtcgatgtggctgaaaatgccttttcaggcaacactagtcaaccaagcattggctccctttactatgccttggagaacaccccaagagcccctgagttaaacatcaataacttggaaaaaatcaacaaatattggcaggatgtcagaacccagtaccaggcctttgaggaagcagtctcggcttctgcgactgaagtttacaagcaccagatgcctggtggccaatacaccaacttaaaacaacaggctaaaagtattggcctagaagaccgttgggaggaaatcaaggacatgtacgcctgggtcaaccaaatgtttggtgatattgtcaaggtcaccccatcttctaaagttgtgggagacatggctttatttatggtccaaaacgatttgtccgaagaggagatttatgaaaaaggctctagcttcagctttccccaatcagttatcgactttttccaagggcagttgggccaaccggtgggcggttttccaaaaaaactccagtccatcatcttgggagataaaaagccgattgaaggcagacccggtgattacttggacccggtggactttgaagcggtcaaagcagagttagaagaccttatcggctatgagccaagtccagaagaagtcctttcctatgtaatgtacccccaagtctttctggactaccgcaagctctacgaagagtttggggatgtcaccaagattgactccctcaccttcttttatggtatgcgggaaggcgagcgggttgagattaccattgaaaaaggaaaaaccttgatcattaaattgaactccatctctgatcctgaccctgagggcaaccgaaccctttactttgaactcaacggccaagagcgggcgattgatatcaaagaccaaagtattaccagcaccaaggcggtccgtaaaaaagcagagccttccaataaacatcacttggcagcgaccatgccgggatccgtactggaaatcctggttaaaccaggggactctgttgaaaaaggccaggctatcgtcattaccgaggccatgaagatggaaaccactgtccgggcccaccaaagtggccatgtcaaaaatgtctatgtgactgaaggagacccgattgaagtcaatgacctcctagtggaattggatgatgcccagtaagaccagacataaaatatacctattagctttaataagattaaataaaccacccttctaccaggataaaggcttggttaagggtggatttttagtcaagctaggctggggaccacaagtttccctatactttttttaaaaatcatgtacaataaataatgtgacaaaaccgaacgatattaaatgatgaaaggaggaatatacgtgaaaatcaaacgaagcgaacgtttagtcgacttgacctactacctcatcacccacccctttgaaattgtatccttaacttatttttctgaccgttttcaagctgctaagtctagtgttagtgaagacctggctattattaagaaaaggtttgaaagtcagaaaattgggaagctagagaccataccaggggcttcaggtggggcacgttttatcccccgcctagccaaggaagaccaggaggcaatggttcaagacttgattgatgaaatcaaccacactgagcgacttttgccgggtggtttcatctatttgtcagatatcttgggcaatcctaagtggctccaggtcatcggaaaagttattgccaaccagtatttggaccaagacatcgatacagtcatgactgtagcaactagcggaatcgccgtagcccagagcgtggcaagttacttgaatgtcccttttaaaattgtcacccgggaccccaaggtaacagaagggtcaactgtgagtgttaactatgtttcaggcgcaagtggtcaaagggtcgaaaaaatggagttgtcaagaagaagtttggaagaagggaccaatgttttggtggttgatgactttatccgaagtggggggaccattgaagggatgcggtccttgctggctgagtttaaagctaacttaattgggtcagcagtagttgttgagaatttagtgggcaaaagtgacaaacccaaagactaccaaaccttaatcagcgtggcccagatagacgaagatcaaaagaccatcgaatttgccctcggttccctctttgattcctagttattgggctttatagcttaccgtaatctttgctattttatgttgtaagcactatgtacacgctttacatgtatggtatgatggataaggaaatacaggtggataggagctaattgaacacatgaatcgatatgcaattgtcttggctgctggccaaggaactaggatgaaatccaagttatacaaggtcatgcaccccgttatgggcaagcccatggtagcttatgctgtggatgcagcccttgaagctggtgttgaccaagtcgtcaccgtaactggtgtcggcgctgacctagttcaagactacctgggcaataaaagccagtatgttctccaggaagaacagctagggacagcccatgcggtgatgcaggccaaagaaatgttggtggataaggaaggaatctcgattatcctcagtggggatgctcccttgattagtcctgaaacgattgagtccttgctagactaccatgaggcccaccagctaaaagggtctatcctgactgctcatgaagcagacccttatggttacgggagggttatccgtaaccaagacgggacagtggccaagatcgttgaggaaaaagatgccagcccagaggaaaaacaagttcaggaaatcaataccgggacctattgctttgacaaccaagccctctttcaagctttggaccatgtctcaaatgataatgcccaaggagaatattacttgcctgacgtcattgagattttaaaaaaccaaggcgacttggtaggtgcctaccaaatggatgataatacggatgctttaggggtgaacgaccgagtggctctgtcacgggccaatactctgatgcgtcgccggattaaccaggcccatatgaaaaatggggtcagcttgatcgaccccgaatcaacctatattgacgttaacgtcaccattggtcaagatacagtcatcgaacctggtgtttacttaaaaggggagacagaaattggccaggatgcccacattggagctcattcgattattgaagattctcaattgggagatggggtagtcgtcaagcagtcgaccattgaagaagccattatcggccccaattccgatattggtcctaacagccatctaagacctggagctatcttgcaagaatcggtccatgtggggaattatgttgaaatcaagaaatccttagttaaatcaaaagccaagctaggccaccatgcttatgtgggagatgcagaagtcggccagggagttaatgtttcctgtggtgtgatctttgccaattatgacggcaaggacaaacaccggtcagtgatcggggactatgcctttattggaagcaatgttacgattgtttctccggtgacagttgaagcaggggccttcctggcagctggttctaccattacagaggatgtcaagcaagatagcctggctattgcccggtccagacaagtcaacaaagatggttacacaaaaaataaagatcaaggatgaaaaaggagtatattatgacaaaaagtcaagccaatgcgagtatcaagctttatgccctgagttccaaccggcctttagctgaaaaaattgctgaagatgttggagtcgaattaggtgatattaccgtgtcgaaattctctgacggtgaaaccagaatcagccccaacgaaagtagccgggggtccaatgtctacatcatccaatccacttctgctcctaccaacgacaacctgatggaattgttgattaccattgatgccatgagacgggcttctgctaaaactattaacgtcgtcatcccttactatggatatgctagacaggaccggaaggcatcttctcgtgagccaattactgccaaacttgtggctaatatgatttcaacagctggtgctgaccgggtagtcactatcgacctccacgcctcccaactccaaggcttctttgacatccccgttgaccacttggtgggggcgcctctcctagctgattggtttttagaccgagatttgagcggtgatgacgtggttgttgtttcaccagaccatggcggcgtgaccagggcccgcaagttggctgaattcttgaattgttctattgctattgtggacaaaagacggcctaaaccaaatgtatccgaagttatgaacttggtcgggaagtatccggtaagaaatgtattttaattgacgacatggttgacacggcaggaacaatatcatcggcggccaaggccttggttgaccgcggtgcaacagacgtttatgctactgccacccacccgattctttcaggaccagctattgaacggattgaagactcgccgattcaaaaaatggtggtcaccgactcgatctatttacctgaagagaaaaaatctgacaagttagaaatcgtctctgtcggagaactagtaggccatgccattaagcgaatccatgaaaaccgccctgtctcccctctctttgagaaacaatttaaacatatgcgctaaaccaggccataaaagaaaagcaaattgagcctgtcttgccttatgtgggctaggagtttgcaaaggcctttcatgcttgagcctggttacggatgaggaggttgaagtcgtgttaggaaaaatcaagctccatttgcagcagatgaaagttttggatattctcatcatcgccatcctctttgccagctcttttatccctcatgccatttacgcctaccaactccagcaattagatgaccaggctgttaaagttgtggcccgagtgaccatcgatggccaggaagtctattcgacggaattatcggaggagaccccccatgaagaattcaccctctacccagaagagggccagtataacgttattgaggttgatggtgaccggattcggaacaaggaagacaatagtcccaaccaaattggggtgaaaaggggatggattagcaagccgggcgaatctgccattgtcttgccccaccgactagtggtagatgtccatgccgttaacgatgacggtcaggaagttagtccgggcaacttagaagaccaggaggacgaatctggtatccaagaccaagaagatgtgatcattcctaattaattttccatttaacattaatccgttttagagagcttttatatgttaattatattttatttatgttaaaataatttatatcgactaatattaggggggatatagaaatgaccttaaaaaaattgatcgctttattggccgtttcttctctaactttggcagcttgccaagaccaagctgaagaccctgctgaaactgaagaagcgactgaagagccagcagaagaccaagaagagaccgaagaaggccaagatgacgaagccactgaagaagattcagaggaagaggcagctgatggtgaaggtgacgaagctgacagccaagacacctttgacaaggcagctgaaagaactgacggggaagcagttgtcccggttggtcttgaagttttaggcgaatggaccaatgatggctatgttgtaaccagttctggccctcaagctgaaattaacctcaatattttgccagatgaaggtgtcgaacaattctacgtctacattactgacgaagatggaactatccttgacaaggcagagaatgaggttgaatatatttactctgttgatggcgttgaggacgaaatcgtcttatacgctgggacttccgaagatgatctcgatgaggtagatgatacggtagatccagaacaggactttgtccgtaatgaacggattatcatccaaccaggtgaagaagttccggaagaagaggaagcataagagctaaaaggagggggaccccctcctttttaactacatatactgaggctaagtggctagccgaaatccttacctctattgtcccggctttttgcttctggtacaatagggcctgagttagcatacttcctttccggttgaggaggagagtccctagatgaagtggttggaaaaaatctacttttacttacatggtcgctacggcagaatagatggcttttctaaatttttagtcctcctagccatcctgcttttagccttgagcaatcttttatcgactaggctagccttttacttgggcttggccctacttgcctatgcctcgctcagacccttatccaaggaaacagctaaccggaggaaagaagaggctatctaccaagatgtcaagggtcaagttaaatcttttgggagaaagcttcaagctttcttcaattcaggtaaaaagagggcccgaagcagtcaaactgagccaattaggcctaatgacaaaactattgtcatttgccccaaatgccagcaaaaattgcgggtagacgaggggaaaaagctcaggataacttgccctaaatgtgggacagtttttaccagccatagctagaaggaatgaaatttgaaaactactgggcaagggcccagcttttttgcttatcggaaatttttagtttactaggaaggtatggagacaggatgaagttaattttcggactgggcaacccaggcgacaagtaccggtcaaccaagcataatataggctttatcacccttgatgaaatagcctttcaaatggggttagcctttaacaagagtcagtttcaatcggtttatgccgaaggtcggatggggagcgaaaaagtcttcctgatcaaaccccaaacctttatgaacctctctggccaatctgtcagaccttggctggattactacgatttagatgaagggtcggacatggtcgttgtccatgatgatttagacttggctgttggccaagtcaggctgagagaccaaggggggcatggtggccacaatggcttaaggagtattatcaaggagaccgggagtaaaaaattcaaccggataaaaatcggcatcggccgacccaagggtaagatgtcagtggtctcccatgtcttaagccaattcccccaagaagaccaccaggttatgatggaggcggtgacccactcttacaaggccctccaagcctggggggaaggcatgcccttccaagaagtgatgagcaagtttaactgatagagacctgtgatgcacccttgcttttgcggtgcatcctatttctgtttcaaaggagaatgtagcgtgacccgcttaattgacctatttaaaagacaagatgacatccagtcactctttcaacaagtccagccaggacagacccacctggtaaccggtattgctggttcggcccgggccccttttttcctatgctctgctagaagaaaagcaagaccagataatctggattagccaaaatagcttccatgctaataagttggctagcagtttaagtgactttttaccccaggataaaatccatgtttttgaaaccaatgatgtcctccacgctgaaatggcctttgcgtccccagaagccgtggcagaccgggtggagaccatggaatttttggcttcaggccagcctgggattgtcatcatccctttggccggagtccgcaagcttttgcctagcctggacctctaccgcaagatgcctttgacgattcaaatggcttctgatttagacttagatgacctcagccggcacttggttaagattggctaccactatgaccaaaaagttgctaaacctggtgagttcagcataaggggtgggatcattgatatctttccgatcggctaccaagacccagtccggattgaactctttgatacggaagtcgactccatgcggcggtttgacttggagagtcagcggtcagtcgaaaacattgaccaagtccgtatcctaccagccaaggactattttttaaccgaagacaaccaagcccaagccctcaaagcctttaatgacaagctggactataccatgcaaaaattaagggaccaagacttgaaaaaagacttggccaaaaatatgacccgggttgaggacagtctcaaagccggtgaaagctctgacctcctagctccttttgtgggcctcctctaccctgacaagacaagtattttagactatgccaaagagtcggctatctttttagtagatgagtaccctagagtggttgcaaacaatgcccaattaaatgacgaagaggctctttggcagaccgaccaattatctcggggaaagatacttcatgacctcagcttcagtcaggactttagggacttaatgggggctaaagagcagggcaaaatttacttctccctcttccaaaaggggatggggtctttgaaactggactctattacccccatccactaccgacagatgcaaaagttctttggccaaatgcccatggtaaaaactgaaatggagcggtatgacaaacagaactatactgttgtcgttatggccgaagatgaggatcgggcccaagccattcaagcaacctttgccgactttgatattccttgcttattaactgagccggatcaaattgaagtcggccaggttcaagtgatcccccaagctattccagaaggctttgagttaattgggaccaagctagccctgatagcggaatccgacctctttaaccgggtcaccaagaaaaaagcccgccggagacaagtgtcaaatgcggaacgactcaaaagctataatgagctccagccaggggattatgtggtccatacccagcatggaatcggccgctaccaaggtctggaaaccatgacgattgatgggataaaccaggactatctagcagtagaatacgaccaagcttccaaactctatattcccgtgagccaactcaacctcctgcaaaaatatgtggcttctgaagggaaaacccctaaaatcaacaagcttggggggacatcctgggctaaaaccaagcggaaggtccaaagtcaagtggaagacattgccgacgacctgatcgacctctatgctagccgggagagccaaaagggttacgcctttgaaaaagacaatgactaccaagctgcattcgaagcttctttcccttacaaggagacggaagaccaactccggtcggcggaggaagttaagtccgatatggaaagtgataagcccatggaccggctcttggtcggggacgttggttacggcaagacggaagtggctatccgggcgatctttaaggccgtccaagaaggcaagcaagccgctttcttagttcccactaccgtcttagcccagcaacactatgaaaccatgctggaccgctttgctgactttccagttgaaattggtctaatgagtcggttcaagactaaaaaagaaatcgatgaaaccatcggccgcttgaaagacgggacactggatgtggtggtagggacccaccgcctcttgtccaaggatgtccaatttttagacttgggcctcttggtggttgacgaagagcagcgctttggggtcaaacacaaggaacggttgaaagagttaaaagagttagtggacgtcctaaccttgaccgctactcctattccccgaaccctccatatgtccatgctgggggtccgggacctatccgtcattgaaacaccacctgccaaccgctacccggtccaaacctatgtgatggagatgaacgagcttgtcattaaggaagccattgaaagagaaatggcccgggacggtcaagttttctttcttcacaaccgggtggacaccattgaaagacggatgagtgatatccaggcccttgtgccggaagctagagtgacctatgtccatggccaaatgactgaaaaccagctggaagagcgactctaccagtttttatccggcgaatatgacgttttagtgaccacaaccattattgaaacaggggtggacatgcccaatgtcaacaccttgctggtggaagatgccgaccggatgggcctatcccaactttaccagcttagaggacgggtcggccggagcaaccggatcgcctatgcctactttatgcaccaggctgacaaggttctaactgaggtgagcgaaagccgcctacaagccatcaaagacttcaccgaactggggtctggcttcaagattgccatgcgggacttgtccatccgtggggcaggcaacctcttaggcaaggagcaacacggctttatcgatgctgttgggttcgacctctactcccagatgttagaagaagcagttgccaaaaaacgtggccaggaagtcagggaggctacttcagccgaattagacctatcacttaacgcctacctaccaagcgattatattgaagatgagtctcaaaaaattgacctctataaacgcatccgccaacttgaatcagaagcagactaccgggaccttcaagatgaactacttgaccgctttggcgagttccctgaagaagtggacctactcttacggataggcttgctcaagcactatagtgaagagagcctggtcgaaaaaattgaaaatacaggcaaaaaaatcaagatggattttgcccaatcagcccttgccgtcttccctatggcagctatcttcaaggctctcaagggaataccggttaaaactgacatgaaaaccgaaaaccagctccaggtttcctttattttgagccgcaacaccgaccaagcaacttggttaaaagccttgttggactttacccaatctttagcagactaccgtagggaaaaagaagcagacaaagatccaaccactccaggtgtagttaaagagggaggggcccagtctcatggctaaaggaaaggagagtcctcccctgcaacaaggggctacctttacccctcctagtcactcctttcgaggggctagtttactggccctagccctcttgttgtccaagttcttaagcgctgtttacaaggtccccttgcaaaatttaactggggacgccggtttttatgtttaccagcaggtctatcctttatatggcatcggtctagttttcacctattctggcctgccggtttttatttccaagcttttggccgaatgccaaactgaccaagaccggctaagccaggcccgaaaaatttttaccctcctggtcatgcttactctgccccttagcttcttactttttgctttttcaggaagcttggcccaagtgatgggggacggccacctgtctactatgattaaattagtcagtcttttttacctttttattcccctcttggcaactagccgaggctttttccagtccaagcttgatatggctcccgttgccttgtcccaggtcttggaacagctgggacgggtgaccattattattttagcagcccttgcctttgcaagtctcgatatatccctctaccagatgggtggcttagccatgacatcttctatcctctcacccctcctagccagcctggtcttactcttgttttttaaccggcgtgacggtgggctggggcaaagctttggcttcagcctgccaagttttgggatggccaaagcttttatcttagaaggtggccaaactgttattgtctacagtcttttactcttctttcaattgcttgattcctttaccgttttcaaaaacctcaagcaagcaggactaccagccggacaagccatgctagccaaaggcgtatatgaccgggcccaaccctttgcccaggtcggcttgacactagccttggccatggccatgaacctagttcctagtttgacccagttctttaaccggggcgactataaaaactggctgaagctatctcagtccaccttcaagttaagtttggtcttaggatcagcgaccagtttggggctgattgctgtcatgcccttgcttaaccaagccttttttgcggattcaaaagggattcaagtcctccagctttatatgggtctcgtctttttcctctccatcagcttaacccttcatgccattttgcagtcgacctcggttgaccactttacgggctacgccatcttattcgtcttgggcctaaaagcccttctcaaccctcttttaattcggtcagctgggatcatgggggctggtagtttgacagtggtcttgacggccttgttaagcttgatcatgtttatccaagtacctcggcatgtttggcaatttatcttccaggctcgctttttagtcaaattcctcttggctaacgctttgatgtattttctggtctcctacctggcaaatttgcttcaagaccaaggccggctagaagctttattaggagcagttgccttgtctggtcttggcctcattatctatacccttgtcagcttgcgcctaaaaatattagacccagctagcctggctaccctaccctttgcaaaaatactcaagaaagttggaggctattatgactaagacacacgcgataaaaatcttcggtttgggccccagtgacctggaccacctgtctttgggaatctaccgtcgaattttagaccaaggtaagatctacgtgcgaacacaagaccacccggttgtgaatgaactaagggagtccggggtgaccattgagtcctttgactgggtttatgacctctacccagacagttttgaccaggtttacgaccggatctgccaggaagttttaaaactagcccaagataaagaagtcctttatggcgttccaggtcaccccagggtgggggagcagaccacggtcttgttagaagcagccagtgaccaggtccaagtcttgggagggcaaagttttattgacgacctctttaatgcagtgggagttgacccggttgaaggttttcaattagtagatgccttggccgttcaagctgatgacctagtgactaagcaacatttgattgtcatgcaggtttttagtagcttggttgctggggacctgaagttgaccttaatggaccaatacccggatgaacaccccgtctacctggtagatgctgctgggggtaaaaaccaggccgtctaccgcctccctttagccaaaattgaccactttgagggcgtccataacttacgaaccctttacgtcccacctttggaccgggatgaccgaagccggtcatttgccaccttgttgtcttatacagatgagatcatggggcccggtggggatgcttggattaaggaaaaatcaagtaaggacttgatcccctaccttaaggaagaaacggcggaattagtggcagccattgaggcagaaaatgatgacaatattgtcgaagaattaggggaccttttgatgcaggtggtctaccaggccaagctgggagaacaagaatcttatttttcgattgaagacgttcttgaaggtataaacaagaagctacgccggcgccacccccatgtctttgatggtgttaaggcagatagtccagaagaagttaatgaaatttggcaagctattaaagccaaagaaaaagaagaacaaaatgagagaaaggaatgagcctatgcggttggataaatttttaaaggtctcccggattattaaacggcggactatcgccaaggagattgctgaccaagaccggatcaaggtcaatggccagcttgccaagtcctcgaccaaattaaaagtagctgacgagatagagattgaatttggcaacaagaccttaaaagtaagggtagattccctgcaagacactaccaaaaaagctgaagctgacagcttgtatacagtccttgaagaaagctacaagcgagactattcaaattaatggcttctgaccttgattctagtaactgacccctgtctctttaaccttctcaggcctctgctaaaaaataaatttgctgggtttatctattttaaaagccggtatttattgatatactaaaatggaccatccagtaaaaataaggagccaggcctatgaaagagacgaaaactgggaaggtgacccacttaaacaacccttatacaagtgaatataacctgcagcaggacctgttgcgaaaacgcaggacctatttgaagcgacgtttggcctttattatggtggtaggtttgatcttacttgctataccaggcctgcccttggtcaagaattatttccaggtccaagattacaaagcgcaagaggcccaggctcaagaagatttagaaacattgcaagcccaccaagaagatttggcctattatgtggacttgttaagtgatgaggaatacttagccaagctggcccgaagtgagtattatctaggcgaagatgaggatattatctttaacctacctgaagactatattccagaccaccaacgggtaattgatgacttccaagaaaaagaagaggcaaggcaggaagaccaacaaaaagctgacccagaaccagaagattcctaagcatttccgcccaaagttgtaggaagtgcttttttatctggaccaagggctaggactcctcctttagcatggcttttccaattttgacacctaaaaataatagattaaaaaggagcatcttcatgtgtttgctagcattttcgattcacaaccaccctaactacccctttatactggtttccaatcgggatgaggcttacgatcggtcggcagttcccctccacacctggctcaactaccctgaagtaacgggtggtttagacttgaaagaaaaggggacttggttgggctataccaagcaaggcaaattcgccactctcttaaaccaccccttcacggactggcaaccagacttagacccaccccggtcaagaggtcacttgctgaaagattatttgacccatgactttggacccggcgaatttgaaagggttttaaaagcttcccgccggcgctataatagctaccacctcttgtatggtagttttgatgacttgcattattatacaaatgcaggcgataaaagctttcgctaccaaccgggtttgtatagcctggccaacactcaagatgatttaagccggcaccggttagacaagtcggcctgcttattaaaagactacctagctagccatgagggagacattagacttgaagatttaacccaattgatgactgaccaagaacaggccaaaactttaccaaacctgcctccctcactgagtcccgaaacagccaaggagcggtcctcgatctttatcaagggtgaagaatttggcacagttgccacaacggcccttttagtagaccaggcaggcatcatctcggttagggaagtaaggtatgaccagaccggggttaccgaagtgacagaaaaggtccaacgattaaccctttaactccctattttaaaagcccagtagccagtgaaattgtcctttatttacctcctgtaacatgctatacttatatcaaatattttaggaggatatgggagaaacatgtctattgaagttggtagtattgtcgagggtaaggttactggtatagcaaaatttggagcatttgtggacttgggcggtggccaaaatggtctcgtccatattagtgagatttccgacaagtatgttgaggatatccacaaggaactcgacaagggccagaccgttaaagtcaaagtcctgtcaattgctgatgatggcaaaatcgccctgtctatccgcaaggcccaggcaaatgctggccaagaccaagccaaggccaaggaagaacaaaaagaggaagttggttccaagtccaacctttacaagaagcgaaataataagaaagactttgatgcgatgatgaactccttcttaaaggatagcgaggaccgtttatcatccctacgtaaaaacactgaaggcaagcggggtggccgtggcagtcgccgaagctaagtctagaccacctttaacctgtgaccttgtcatgggttttttcttttttgactgcctctaagaaggcttgactagcaaggtggctttaacatgaacttgattgaatcgatcgaaaataacatagttaaaaaccacttgtggaccaaagatgatagcttactacttgcagtctcaggtggggtggattccgttgtccttctttatgccttaggggaattggctgaccgttttcaacctgctaagataggggtggcccatgtcaaccatatgacccggccagggacccaggcggaagaagctggggtccggcagatggcaaattccttcaattatcctgtttatgtgaaaagatggcaagacaagccaggcaagggaaactttgaagaccaggctaggacctttcgttacaagttttttaggcaagtaatggagtcagaaggctatagccacttgctgacagcccaccacttggacgaccaggctgaaacgattttaatgaagctggttcgaggtggcttgttagaagataaacaggggatcctgatgaaaagaaagtgggccggctttgacctggtccgtcccttgttggagattagtaaggcagacatttaccagtttgctcaggattgtggcttgacctactttgaagacgagtccaaccacagaccaagctacttacgtaaccggctccgccaaggggttcttccccaattaaagcaggaaaatgaccaggccttgacccacttggctgactttgctaaggatttaagggacttgacccagctggcccaggagacgctggaccgagttaaggcagacttagtggacgacacagaagagggcgacttaaccttctccattccagcctttctcgacttgcaaccggcccttcagcgttttttacttcaagatcttttaaaggaagtctttcaccaaagcaagtcctttaaaaaagactatatcgatttgattttaaactggttgcgagagggcaaggttaacagttcacttgacctagcccgaccttggcaagtttacaaaacttatgatcaattttatttgcgtagagtagggcaggaaaaaactcagtctggatcgaaaaagggtcaagggcaaacttactatcttactttaaaccagtgggtccaggttagtcccaatgaaaaaattggcttttttgaagccgaccaccccgtaataaaaaaggccgaccttgtcctagctattcccaaggctagtctacacctgcctattctagcccgccaccgaaaagctggagacaagatgacctataggggtggggaaggccacaaaaagatcaaagatatctttatcaaccagaaggtcccaagccttgatcgggaccaagcctggctgcttgaggatgctagagggcaaattctttggttaattggctatcaaggttgtcagttgtctaatgatgctataactgataaaataaactacatatttgtttacaagcaaatgccgacggaggggtagaggaatgaccatacatgatgatttagctgaagtcttagtgacaaaagaagagatttcagcccaaaataaagaactaggtaaaattttaaaagaagaatacaaggataaaaacccgcttctggtaggggtcttaaagggggccctcccatttatgggtgacttgatccaggagctcgatatttatttggaatacgatatgatggatgtttctagttatggcaaccaactttcttcctcaggagaagttagaattgataaggacttgggaacatcggttgaaggccgtcaccttctttttgtcgaagatattattgataccggacggaccctcaagtacttaaaagaactcatgcatagacggggggcagcttcagttaagattgttaccctattggataaaactgacaaccgggaagtggatattgaagctgattgggttggctttacggtccctcaaaaatttgtcgtgggttatggcttggactttaaagactgttaccgcaacctcccctacattggagtattgaaagaagaattttacgcaaattaacacaaagctagtctttggctatgaaaaaaggaaaataaaatatcatactttcttcatagtagctaagactaaagtgtgttactattaccattgacataaatttacatatattttatatgtttagacttggaggaagacatgaataaaaaattttataatagtggattcttctatattctggtttttattgctgtgattgggattgcatactgggctatcggtgatgacacggtgggccagacggaaaatgtaagctcaacagaatttgtaaattaccttgaagaagaccaggtagaagaatttagtatccaacccaaaggctctacctatgaagttacggggaccttccgtaacggccaagagcctgaagtaaatgaagaagacacgaccatctttggtcaagctgaccgcaatatcagtgagtttaccactaacattatccgtaatgacgtggttgttgatgaggtctataacctggctaaggataatgatgttgatacggttaccatggaagaggccacaactggcgtttgggccagcttgcttttaaccttcctaccaatgatcatcttgatcggctttttctactttatcatgggtcgaggccaaagcggcggcggtggtcggggtgtgatgaacttcggcaagtctcaagccaagcagactgaccctgaaaaaagtaaagtccgcttttctgatgtagctggggcagatgaagagaaagctgaattagtcgaaattgtcgaattcttgaaagaccctaaacgtttcggcaacctcggtgcccgcattccagccggcgtccttttagagggcccccctgggactggtaaaaccctcctagctaaggccgtagctggggaagctagggtgccattttactccatttctggttcagaattcgttgaaatgtttgttggtgtcggtgccagtcgtgtccgagacctctttgaaaatgctaagaaaaattcgcccgctattatctttattgacgagatcgatgcagtcggtcggcaacgtggagccggtatgggaggcggccacgatgagcgtgagcagacccttaaccaactcctggttgaaatggatggttttgacggtaacgaagggattattgtcatggcggcaaccaaccgtcaagacgtcttagaccctgccctcctccgtccaggtcggtttgaccgtcgcatcctagttggtagcccggacgttaaaggccgtgaagctatcttgaatgtccacgctaaggacaaaccgattgcagacgatgtagatctcaaattaatcgccaagcaaacgccaggcttctccggggcagacttggagaacttgctgaacgaagcagccttgatcgctgcccgtcgtcgaagtaagattatcgaagccgtggacatggatgaagcccatgaccgggttattgctggaccggctaagaaagaccgggttatctctgacaagcaaagacggatggtggccttccacgaagctggccacaccattgttggtatggtcttaagtgatgcccgcgttgtccacaaggtgaccattgtccctcggggtcgtgcaggtggttatgccatcatgttacctaaggaagaccagtacttggtcactaaggaagaattgtttgaacagattgtcggcctgctcggtggacggacttctgaagagatcttcttcaattcccaaactactggggcctccaacgacttccaacaagcaacccaaattgcccgggctatggtaacccaatatgggatgagtaccaagcttggacctgtgcaatacgagagtgatgacaaggtctttatgggccgcgactatgggtccaacccatccttctcccaacaattcgcttctgacattgatgcagaagtgctgaacttaatgaatgaagctcacaagaaagcccacgaaattatcagccagcactcagagcaattgaccctcatcgctgagaaattgcttgaagtggaaactcttgatgccaatgaaatcaagtccttgttcgaaaccggcaaaatgccagagaaaagctcacaggctgacaagtatccacgagaaaacaaagagcaagaacacattgccaatgacgatgaacaaatcggaacttcttatgaagaaatcaaggctgcccaggccgatgctgataagcaggataaagaacgcttgggtgaagataacctctataccgacgaagactccacaccagaagaggttaaagaaggccaggaagattctgaagaagctaaagaccaagagtctagttcagaaaatgattcagaagaaagccatactggtgaaaataacccaaaccagtcaagtgaagcttcttcagatggagaccgtgagtcagacaagcaaggatcagagtccgaccaagaaaatgaagactagaaggatcttgcctctagggacaagcaaagcaattgcttgactttaagagactgggtgtgttctactaagaaatagtcagttaaagaggagaaggttgacccttctcttctttttattcccaggatcagggatggctagacagatgccaagtcagtaccagaccaccaacgaggtaaaagtgactagtttaaaggagagaaaattgtggcagataaattgctgaaagctttagcctataatgatgaaattcgtatttatgttgccgatgcaactgacatggttgctgaagcccaaagacgccatgatacttggaacactgctacggcagctttaggtcgggctatgattgggaccagtttactagctgctggtgaaaaaggggacgtctttttaacagtccgaattgaaggaaatggtcctgccggttaccttctggttgacggcaatgccaagggggatattaaggcctatatccaaaacccccatgttagcctccctcttaatgacaagggtaagttagatgttaaaggggcaattggggaccatggtagcctgactgtaaccaaagatatcggtatgagagaaccctttgtgggtcaagtccccctaattagtggtgagttgggtgaagactttaccttctacttggccaattcggaacagattgcttcttcagtggggctgtcagttttggttgatacagacgataccgttcggacagcaggaggctttatgatccaagtcctaccaggggctagcccccaaacgattgaccaattagaagccaccatccaaggcttgcccttgatttctaaaatgatggacaagggtaagagccctgaggaactattggctattctagcaggccatgataactaccggattgttgacgaaatggatatccaattcaaatgcaattgctctaaagaacgttttgctaattccctggtttccttgggggaagaggacatcaaagaaatgattgaagaagacggtggggcagaggcagtttgtcatttctgccgccgaagctaccaattttccaaagaagacctagaagaaatccttgaggaaatgcaagaagcataaagtggtaaaaaggcttgctagctagcaagccttttttatcttggtgaagctagactagtaggaggtccagggatgacaggcctaaaaattttgttgttgaataaaggaaaataatagaaatagtcttgtttcaaattgacttgttcgttttgatcagcgataataagaggaataaaagtgacaaggggtgttataaatgattgtaagtgaacgtaaatccgtctgtgaaggtaactgatatacgcttttagctatgaaagaatagtcaagtgattttttcattactaaccttcaggatcggatataaaaaatacaggcagggatacttgcctaaaaacttctaccctatctaattcaaaggaggctaatatgaaaaaaaccattgaatcgatgcgacagatggctagtttagtggttaagagcttagggctttattggtcatcgtcaaaaacatataccatagctcttctactagtcattcctggccagggcctaattcttccgtttagtcttttgatatctagaagtttggtcaaccaaataagtctagaagtcaatggctcgggcaatgtcattgtccttctctttttgctttggctttttcttagcttagtccagtcctgcttaaggcctttagaaatggtgtttcagggtttgatgactgaccagatgattgctcacattaatcaaaatttgatggccaaggcatctaatttaaaaggattagcttattttgaagaccctggtttttatgatgatatacagctacttggcgaagcaagcgggttggcgcccggttaacttgatcgtctttatggctggggttagtcgtagttggtaactggaattgctattctcatcattttggcttcatataccccttggctgcctctttttattttcctagccattcttccccaggttctagttagctatcgattgcaaagggaggcttttgaaagtttggttacgaaaagtccagaagctcgtaagatgaactactaccggtcagccgtattgactaaagactttgtcaaagaaagtaaactttacaatttgggttctttctttatagacaagtatgagtcagcttttaaagtaggtcaagcagatgtcaaacgagtacactataagcaattaaccgtgtccttaatctttagcctaataggaacggctggtattgctttggctttttggtggatgatccgtcagtctttatctaggcaagtaaagcctggagacattttagtctttttatcctcccctatttatggcttgggatagcctgacgagtctggtcgaagaatcgacccttctttacgatacacttttgtatatggaaagatacttccgtttcctgactcttccttccgacgtgccgaaaggtaaccagccccttttaactaacaatagacaagaatttacaattgggtttaagggagttgatttcaaatacccccatgcggaccgtaatgtattaaaaaattttaacctgacgatcaaaaaaggagaccgcctcgcccttattggtgaaaatggggcaggtaaaacaactttgatcaaactattgactcgtttctatattcctgataaggggaagatcatgttaaatggtcaggatattcagaagattcaaatcgaagattatcgaaaattattgacagtggttttccaagacccggctcattacccactcactttagctgaaaatatccggctatccaagttggacaaggagaatagttccttttggctaaagcaagctgtccaatttgctggtctaacagaaattgtaaaacattctgataagggccttgaccaaatcttaaccaatgattttgaagggtgaagagacttgtcaggtgggcagtggcaagctatttcgctggcccgggcttactatagaaatagtggtctgatggtgtttgatgaaccttcagcttctttagatgccacgcatgaagaccacttcatccagtccatgtctcatatgagtcaggatcagactcttctcttagtaacccaccgtttttctgccttgaagttagtggatcgtgctgtttacttagaagggtgccaagtcaaggaagatggttgcctgaaggacttgatcaaagacaaaaaacacgtgtttcacagatcttccaacttcaagctgacaaatatcaaattgactaaatttttcttgacttaagaagtcaggtcgcaaaaagaaaggcgacctggctttttttctgtccacgcttaatttaattttgtgtcaaaataaacatgactcaagactcggtataaattcacaagagtctgttacgctatgggggaagtcgtgatataatagcaattgcagacttttcttttgcatcagtttatggttaagtggaccgaaccagtttaactttatggtaagatgatagtgtgttaggataaagcttgtctgaataattggaatggaaagatgaggctaaaatttgtgtggaaaataggagatattgaaatagacaaccagatcgtggtggcccccatggctggtgtgaccaattcggcttttcgaacaatcaccaaagaatttggggcaggtttggttgtttgtgaaatgatcagtgataaggccctcattcacggcaatgagaagactttgcggatgctacatattgaagaaaatgagtaccccttgagcatccaaattatggggggcgaagccaagacgatggttgaagcagcccaatttattgaaagagaaacggatgctgctattattgacatcaacatgggttgccctgttcctaaaatcaccaaaaatgattccggatccaagctcttgcttgacccagacaatatttatgacctggtttcccgggtggtggaggcggttgaccttccagtgacagttaaaatgcggactggctgggatgatgaccacctgtggccagttgaaaatgccttggcagctcaaaaggctggggcccaaatgctagccatgcacggccggacccggttgcaaatgtatgatggatcggccaattgggacattttagcccaggtcaaagaagccttgtccattcccttcgttgctaatggggacatccggactccagaagatgtggacaaggcctttgaagtaactggggctgatgccttgatggtgggccgggctgccttagggaacccttggataatcaagcaattaacccactacctggcaactggccaagtcctggatcaacctagtcctagccaggttattgaaactgctaaagaacacttgcggcgtttggttgacctcaaaggacgagtggtggctagcaaggaattccgcaaacatgcttcctactatctcaaaggtttccctggatcagctaaggccaaggtcaaggttaatgaacaaacagacccagacaaggtgattgaaattttggatgctgctggccttgcagcagaggaaaaattagctaaacgacgggccagacgtcaagcccgggccagtcggtaaccatccatttgcttgacactgctactattactatgaaaatcttggaagactacaatagaatggagttaaggaaatgagtcaggataatacttctaatcaaaatactgaaaatttgaatgaccagatgttggtccggcaagaaaaaatgaaaaacttggctgacaagggattagacccttttggtagcaagtttgaccgaaccgattattcagaccagattataagggactatgaaagcttttcgaaagagaactgcaagaaaaagacagccatgtcaccattgcaggccggatcatgtctaaacggggcaagggcaaggctggttttgcccacctcaaggataagaatggtcaggtacaaatctatgtccgccaagacgaaataggggaagacgattatgaaatttataaatcggctgaccttggtgactttatcggtatttcgggccggattatgaaaactaacaccggagaagtgacagtacgggcccaagaatttacccacctgtctaaggctctcagaccccttccggacaagtaccacggcttaactgatgttgagcagaaatatcgtaaacgttacttggacttaattgccaatgaagctagcctggaccggtttaaaaaacggagtcagattatttcggctatccgcaagcatatggatggcctaggctatttagaagtcgaaacccccttcctccacaaccaggccggaggggcagcagcgagaccctttattacccaccacaatgccttgaacactgacctttacctccggatcgccctagaacttcacttgaaacgcttgattgtcggcggtatggaaaaggtctatgaaattggtcgggtcttccgaaatgaaggaatcgatgccacccacaaccctgaatttaccatgctggaagtctatactgcctaccaagattactgggacgtgatggacctaaccgaagacttgatccggtctgtcgcccaggatgtcaaagggactactgtcattgaatatggggacgagaccatcaacctggaagaaaaatgggaccggaagcatatggtggacttgatcaaggaagagactggtgttgacttttggcaagagatgaccgatgaccaggcccgtcaaattgccaaagaccaccaggttgaagtagaagactatgccgagtatgggcacgtggtcaatgaattctttgaacaatttgtggaagataagctccgccagcccacctttgtctatggccacccaaccgccatctcacctcttgccaagaaaaatcctgaagacggacgctttaccgatcgttttgaactctttattgctggccatgaatatggcaatgcctttaccgagttgaatgacccgattgaccaacgggaaagatttgaagcccaggtcaaagagagacaagccggcaatgatgaagcccatgaggtagacgaagactatcttgagtctatggagtatgggatgccgccaacaggaggattgggaattgggatcgaccgtttagtcatgctcttaacagatgcccacaccatcagggatgttgtcttgttcccaaccatgaagaatattgaccgttaaaaaatgtaaacttctgggcattttctaaagaatgcccaggctacatactgaagaggagtgccgaatgaaaaaaaccagatggattgagtttttaggtggcagtaacttactttacacacttgctgtcatctttttaatttcgttaactattttgattttaaccttggtggattttgtttttacccccatcatcgttattttctctaacattttaatgcccattattatagccgttctgttttactatcttttagacccccttgtctctttgtttgagaagaaaatgtcccgaatgtgggctacttctttagtctttgtcattattttgatcttcttagccgttttggtagccatcttaattccagtcttaagcgaacaaatcgctaacttaattgaaagcttccctgtctttctgaacgatgttttctcaagcatccaagacctcttagctaatttgccagccaatgatttcttcgatactattcttcaaagtttgcaggacttatccaataccttatttgacaacctaggccaaatctttagccaaggcataaccaatgtatccaatgtggtctccagtgttacaaacgttgtttttacccttgggatctttcctgttatcttgtttttcttactaaaagacgaagagaaaataattaagggcctcctgtttgtgactccaccgacctggcggaagagtttgatccggattggggcggaagtcaacttgcaagtaggggcctacattaagggccagttgattgtggctattgccaatggggtgatgatgtttgtcggctttaccttaattggcctcaattacgctgttgccctaagtgttttgggcggtttcctctcacttatcccttatattggcccaattttaacctttattcctgctatttttatcgccgcttttgattcctttaccgaagtcctgctattactagtcgtttgggccattatccaatttgccgaagggaacttcatcgaacccaatgttatgggtaaaaggttaaatatccacccggtcaccattattattaccttactggtcatgggagacttgtttggtctcttcggtctagtctttggtatcccaatgtatgccatcttaaaagttattgtcatccacttctacatgatgtttaaatctcgctacaatgaatactttggcgaccgtgctggagaatatgaagtagacagttgggattccaagaaatatggtgacaaggatattctagaaaccaaggatgaatacgtcgaatacctttacaaaaaagaactaaactcataagaaagaccaaaagacaggcaggattttgcctgtctttttaactattaaagcctcaggatgagcaatccatctagctttagcttgattactctagaagccaatttattagcaaaaacaacttgacaggccaataggaaattgatactatgttacttgtcgccgagataggtggctaaagcaaaaaaataaatttgacaaaattttatatggatattgactattagtgaagaatatcatataatgattttgttaagcgagttgccattttataaagaaaatgtaaatgtaaagtaaatcttttttaaagaaagacttgcaaaaataattttaaatggtacaatatttcttgtggcttgtcgaaaatagcaagctagagatagctcgatctttgaaaactaaataagataaacaccaagaagtgcaagggtcttaagctttacctttgtaaagcgagacaattcaagtgcttttataagtttttgaaaacttataacaacaatgaaccaagatagaacaggtgttaacctgaactcttttaaaacgagagtttgatcttggctcaggacgaacgctggcggcatgcctaatacatgcaagtcgaacgccaaatcttcctgcttgcaggaagaggcggagtggcgaacgggtgagtaacacgtgaggaacttgcccataagagggggataacacccggaaacgggtgctaataccgcatcggttttcccagtgcatgctggggaaatgaaaggtggctctgctaccgcttatggatagcctcgcggcgcattagctagttggtagggcaaaggcctaccaaggccatgatgcgtagccgacttgagagggtgatcggccacactggaactgagacacggtccagactcctacgggaggcagcagtagggaatcttccacaatgggtgcaagcctgatggagcaatgccgcgtgagtgaagaaggacttcggttcgtaaagctctgttgttggggaagaacacggataggagtcactgcctatcccttgacggtacccaaccagaaagtcacggctaactacgtgccagcagccgcggtaatacgtaggtgacaagcgttgtccggatttattgggcgtaaagcgagcgcaggcggtccggtaagtctgatgtgaaagcccacggctcaaccgtggaacggcattggaaactggcggacttgaatgtagcagaggaaagtggaattccatgtgtagcggtggaatgcgtagatatatggaggaacaccagtggcgaaagcgactttctgggctatgattgacgctgaggctcgaaagcgtggggagcgaacaggattagataccctggtagtccacgccgtaaacgatgagtgctaagtgttggagggtttccgcccttcagtgctggagttaacgcattaagcactccgcctggggattacgaccgcaaggttgaaactcaaaagaattgacggggacccgcacaagcggtggagcatgtggtttaattcgaagcaacgcgaagaaccttaccagctcttgacatcttctgccaccttcagagatgaagggttcccttcggggacagaatgacaggtggtgcatggttgtcgtcagctcgtgtcgtgagatgttgggttaagtcccgtaacgagcgcaacccttattgttagttgccagcattgagttgggcactctagcaagactgccggtgataaaccggaggaaggcggggatgacgtcaaatcatcatgccccttatgagctgggctacacacgtgctacaatggatggtacaacgagtggcgagaccgcgaggtttagctaatctcccaaagccattctcagttcggattgcaggctgcaactcgcctgcatgaagtcggaatcgctagtaatcgcggatcagaatgccgcggtgaattcgttcccgggtcttgtacacaccgcccgtcacaccacgagagtctgaaacacccgaagccggccgggcaaccatttggagccagccgtcgaaggtgggttggatgattggggtgaagtcgtaacaaggtagccgtatcggaaggtgcggctggatcacctcctttctaaggatcctgccaaagggcaggggaacttgcactaggccattgtttgtttagttttgaaggatgtattccttcccttgttctttgaaaactgaatagttgaatcgacatttatcatcaaatgaagacaacaccgagatagcggaatgagcaatcattccacgttgaagagtctattttattgcaaggcaataaacgagaacacaacgctacacatactcacttaacttcggttaagtgaagaagggcgtacggtgaatgccttggcactaggagccgatgaaggacggaacgaacaccgatatgcttcggggagctgtaagtaagctttgatccggagatttccgaatggggcaacctcccatctttagtcggatgagactaggaaagtgaatccatagctttcttaggggaagacgcggtgaactgaaacatctcagtagctgtaggaagagaaaacaagagtgatttcccaagtagcggcgagcgaacgggaaagaggccaaacagacatgcttgcatgtctgggttgtaggactcaatgtcgggaccggccgtttaaggtgaacaccctggaaagggtggccagagcaggtgatagccctgtaaccgaccgagcggtcggcccatgaggatcctgagtacgacggcacacgtgatatgccgtcggaagccgggaggaccatctcccaagcctaaatactccctagtgaccgatagtgaaccagtaccgtgagggaaaggtgaaaagaaccccgggaggggagtgaaagagcacctgaaaccgtatgcttacaagtagtcagagcccgtttatgggtgatggcgtaccttttgtagaatggaccggcgagtgacgatcgactgccaggttaagctgaagaagcggagccgaagcgaaagcgagtctgaagagggcgcccagtaggcggtcgtcgacccgaaaccaggtgacctacccatgtgcagggtgaaggtgcggtgaaacgcactggaggcccgaacccacgtatgctgaaaaatgcggggatgacgtgtgggtagcggtgaaattccaatcgaacctggagatagctggttctctccgaaatagctttagggctagcctcggatggtgcatggtggaggtagagcgactgtttggacgagggccccttatcggggtaccgaatcctgataaactccgaatgccacccatgccagtccgggagtcacactgcgagtgataagatccgtagtggagagggaaacaacccagaccgtcggctaaggtccccaaatccttgttaagtggaaaaggatgtggggctgcttagacaactaggaggttggcttagaagcagccatccttgaaagagtgcgtaatagctcactagtcgagtggccctgcgccgaaaatgtaccggggctaaacaaggtaccgaagccacggatagaatatctatggtaggagagcgttcgatgggcggggaagctggaccgtaaggaccagtggagcgcatcgaagtgagactgccggtatgagtagcgaaagacgggtgagaatcccgtccaccgaatgacgaaggtttcctggggaaggctcgtccacccagggttagtcgggacctaagctgaggccgaacggcgtaagcgatggtcaacaggttgatattcctgtacttctttctttcgtttgactgacggaaggacgcaggaggcaaagagtagcgcgctgctggactagcgcgtccaagctaggagctaggtgaggagtgaaaggcttatcaccgacggtgactagtgatggggagggaagttgagtaccgaaggatcagcgtcacactgccaagaaaaatttctagggagaaagaaaggacccgtaccgcaaaccgacacaggtcgtcgagatgagtattctaaggtgagcgagtgaactctcgttaaggaactcggcaaaatggccccgtaacttcgggagaaggggcgctgacgcaagtcagccgcagtgaataggcccaggcgactgtttaccaaaaacacaggtctctgctaattcgaaagaagacgtataggggctgacacctgcccggtgctggaaggttaagtggacgtgttagcgtaagcgaagcactgaaatgaagccccagtaaacggcggccgtaactataacggtcctaaggtagcgaaattccttgtcgggtaagttccgacccgcacgaaaggtgcaacgatctgggcactgtctcaacgagagactcggtgaaattatagtacctgtgaagatgcaggttacccgcgacaggacggaaagaccccatggagctttactgtagcttgatattgagtgtttgtaccgtttgtacaggataggtaggagccaaggaactctggacgctagtctagagggaggcattggtgggatactaccctaacggtatgacccctctaactcgccaccctaaccgggtgggaagacagtgtcaggtgggcagtttgactggggcggtcgcctcccaaagtgtaacggaggcgcccaaaggttccctcagaatggttggaaatcattcgcagagtgtaaaggcagaagggagcttgactgcgagacagacaagtcgagcagggacgaaagtcgggcttagtgatccggtggttccgcatggaagggccatcgctcaacggataaaagctaccctggggataacaggcttatctcccccaagagttcacatcgacggggaggtttggcacctcgatgtcggctcatcgcatcctggggctgaagtcggtcccaagggttgggctgttcgcccattaaagcggtacgcgagctgggttcagaacgtcgtgagacagttcggtccctatccgtcgcgggcgttggagatttgaagagagctatccttagtacgagaggaccgggatggacgcaccgctggtgcaccagttgtcatgcctatggcagagctgggtagctatgtgcgggaaggataagcgctgaaagcatctaagcgtgaagccccctttaagatgagatctcccattccaagaaggaagtaagacccctgagagatgatcaggtcgataggcttgaagtggaagtgtagcgatacatggagcggacaagtactaatcggtcgaggacttaaccacgcaagtgagtaagtgagatttcggtggcgttgacggttcaactagtcagttttgagagaacaaggccggatgtgtggtgatgatggccagaaggacccacctgttcccatgccgaacacagtcgttaagcttctgagcgccgaggataatgcagggtttccctgtgtgaaagccggacgttgccacgctttccttttcttttatcattaacattttgatgattccgcaatagctcagtggtagagcgcgcgactgttaatcgcgttgtcgtaggttcgaatcctacttgcggagctttttctttccagggaatagtcctaacaggttaaatcggataaaagtaaaggatttgtaaaatatatttatataaacttcttgaattgactttggaatttggtataataaattttgttgaactttctaaatatgccgctttagctcagtaggtagagcgcatccatggtaaggatgaggtcgccagttcaatcctggcaagtggctgtctgacaacctataagaagtggttgtataacccacaagcgttggtataatagcgtttgtgggttttctttttctaaagaaagaactagaaagcagtagaatgaaatattttttgcaatgattttgcagtaataaattactcctcctaaaaccaccaattatttatttttgtttgaaatctacaatttagatcaaagatgtaaaattattgtaaatattcaaaaaagcaattgatttttttagacaatcatctataattttcttatccataaaattttgttatttagaaaatgtgtactactcagttctcattggtatttagtcatattaaagaaggagagtatcatgaaaaataaagttaaaaatttgcaggtgctgttttagtcgctctattactcggtggaaattcgattacagtttttgcagctccacaggtgtttggtaataaatatagtggagcatctactgaagaggttttgcaaattagatatgatggggctgcatggaattacaaacagtcaccttataagagtacttcatttagatatactcgaaatggtaaagtattattacaaagaactgcttttaatggaaaagtaactggttcagtgtgggatgacattcggtggggtagcaaatttacaacaaaattttcttggtggcgtggacctcgaaaataatatggtggaatgatgttgctactaggggagccatacaaaatttaatgttggtgacatgaagaggtgatttatgaaaggctctctttttcgctatggcgacttaatagaagctggcttagtcttttttacctgcctgatagtgacggtcatttttgcttttctggatcaaaattttcaaggtgaagcaagctatctggctgaatttgtcttcagtattttagaacaccaagaaacagttgccttagccctaaccctcttagcccttatcttcatttaccaatttattaaacggcggcagcttgaagtccgcctccgcttcttagttggggcgagaataaatatgatccgtttgggctatctttgcctcttgctggcttccttattcacggccttctttctaactatctgcctaggactcctattaagtcttagccttcagcttactatcgaagtctttttattcctattagtatactgccttgtcagcatgatttgggtgagaatcgattgaaaactttaatattttttatcaaggatgtttttttgaagcgctggctcccccttctgggtttccttattgtcctctttatggccaacttgctcttatttacaggagtccggtcacttatatccacctaccaaggctttcgtgaaaatgcatttttgcttcaagatggtatttttattagcaatatagaccctgagaaaaatgcccaggtggattatgaccagattgatcttgaccaaactcaaaaggtctatgactacttagaagaccatacccattacgggattgaaatgtttggttataccactgacctagccaaccaggatgagatggatgtcttggtcaattatgtcaaccagttaggctttcaattaagaccacttccaatcgctgagggagaaagtttaaattttgaggatggaaatcctaaaggggtcttggttggtgctggtctggcccaggattacccgattggttgtcattttgactttgacaaccctgtgactggtcagagggaagaagtatttaccgtagggatcttagagaccaatgcttaccggtcaaacctttacgctttaaattctaaaaattacttcaactatacagttttttatcccctaacccctaactttatccagtcatcaacaaaagaccttcaggtgaacgccctcaatgacctcatcctaacccagtcatccagaaaagaggctgaccaggtgaaagatttgataaaggcaacaaccgggcttagttataatttttttagtcaagctcgtaataccgcctacttccaggactattatagccaatcgattgcctttattttgggcttaactttactcgtgatgattcttgccatctttttggccatctggattaattcggttagtatccgcctagcgataagggatatgaccctccatatgctggtaggcttgacctaccatagactccgcctcatcctctaccagttctatggtatcttgttagccatcgtcatgctagttctaaccttattcacttcttacaatcgctatacgacgatcttccgcaaagatgctatctttgccagtttaggctttctccgcctggttgatatagactgggctgccttaggaattgtattgctggttaacctcctctgcctgcccgtgattgtggaagtcatgatggctaaaatcaagcggaagtcaatctctttgggggtgttcgaatgacacagttaattgaacttagcctaaagcaaaagcgttttaagaaaaataaacgagtcattttaaaggattttcaactttctgtttcagctggggacagtatagcggtcatgggagaatctggtattggcaaaacttccctcctgaatatactaggcctgatcgaccaggattatgaagggagttataaactcttcggtcggtcagccaaggcctattctgccaaagaccaggctcagatgcgaaacaaccgtattggctttatcctccaagaaaatgccctcattccctcgctttcaatcaaggataacatctgtctgccttggctttactgtccgaaagacaagcaggaccaggtattttttgacgagttgatcaggcgtttgaagcttgatgaccttctcagtcaaaaacctggcgaatgttcgggaggtcagcgggcccgggccgttattggacgagcggtcttgatgaagccggacctcatcttggcagatgagccaactgcctccttagatgaggaaaacagacaagaagttttagccatcttaaaggatttaaacagggactttaaggcaagcctcattaccgttacccatgatcacgcagtcgcacaaaaccaccgtaaaattttaaggatggtgtaaaatgggatttatcgtcatggttttttcatttctttttggaatggcttttgtcgctttcagtattcatttttacagggaaaaccagaataacttctacttgcttttgaccttgctgggaattttgcttattctttttgctgtttacctagctgtctaagtctttgtctgcaaattattgacctagttttaagcataacatgccaaccattcaatccatctcatttgatagatcctagacctttttagggaggtttagggtctttctttttgtcatttttccccaacagagccagtagaccaagcaaatgagaaatccttatcatttagcctgttaactttttaaaatatattttatagacacttgttataatcaaaaaggacttgggaggagcgattggaaaaagtcccccaagaatggacctaggatgtaaccaggagctaagctttaactatagcctagcccctaattgactgaaggcatgtagaagtaaaggagaatgatgatgtttcaaggaagaagtttattaaaagaagttgactttacaccagcagaaattgaatacctgattgactttgccatccacttgaaagacttgaaaaaacgacatattccccatgaatacctaaaagggcaaaatattgccttactgttcgaaaaatcttcaacccggacccggtcagcctttacggttgcttgtaatgatttaggagccaatccagaattcttgggtgccaacgatattcaattaggcaagaaagaatccgttgaagactcagccaaggtctttggttccatgtttgatgggattgaattccgcggttttaaacaagaagacgtggagagcttggctaaatactctggtgtgcccgtttggaatggcttgaccgatgaatggcacccaacccagatgattgctgactttatgaccattaaagaagagtttggtgaattgaagggcaaaaaattagtttactgtggtgatggtcggaacaacatggccaactccctagtggtaactgggtctatgcttggtgtggatgtcaccattgcttctccagaggaactcttccccaaacaatctgtgattgattatgctgaaaaatttgcggcagagtcgggctccacagtgaccgttactgccgacattaaagcagcagtgaaagatgcagatgtcctctatacggatgtttgggtctcaatgggggaagaggaccaatttgaagaacggattaacctgctccaaccttaccaggttaacaaagacctcactgatctgattgaaggggactacatcttcatgcactgcttgccagctttccacgatcaagatacccggattggtcgccagatagctgatcaacatgggattaaagaaatggaagttaccgatgaagtcttccgcgacagcaaacatgcgagacagtttacagaagcggaaaaccggatgcactctatcaaggcgattatggcagctaccaacggcaacctgtttattcctaaagtataagtttagctttcatgagaactcggcttagcttcttgcaagctacagcaagtaactagactgaatactttatattagcgaaggagagatgacttatggcaaggaaaaaaattgtcgttgctctcggtggcaatgccatcttgaccgatgaccccagtgcacaagggcaaaaagcagccctccagtcgacagctcaacagctcgttgctttagtccaaagaggggacgaccttgtgattacccatggcaatggtccccaggttggcaacctcctcttgcaaaacttagcagcagatagtgccgacaatccagcctttgaactggatagtttggtagctatgacccaaggctcaatcggttactggttgcaaaatgccatgcggaatgaactcaatcaattgaggctggacaaagtggtctccacgctggtcacccaggtattggtggacagagatgacccggcctttcaagaccctagtaaacccattggcccttactacactgaagaccaggcgcaagcaaaaatggcccaaagctcagctatctttaaagaagatgctggccggggctggcgtaaggttgtcgcttcaccgactcccctagccattaatgaaattgaaacgattcgaaagctagttgacgaccaacacattgtgattgcctctgggggaggtgggattccagttgtccaaggtcacgaccgaaccttccacggtgttgaagcggttgtcgacaaggatgaggcctcccaaagtttggctagcgcccttgaagctgaccttttcctggttttaaccggggtcgaccatgtctatattaactttaacaaggaagaccaggaaagattagaccaggtcagctatgctgaactggaaaaacacatggctgatggccaatttgctgcaggtagcatgcaacccaaggtccaagcctgcatggactttgtcaaagcaaatcccaatagtcaggcagtgatcacttccttagacaacttggaaaacttcctcaatggtggaagtgggaccctaatccagtatgaagccaaagagtttttagaagcctaatatgaaaacttggcatggtccattaattagttttggccagaccaactattgcctaaaatgagattgaaaagaccgcaagctctcctgcttgcggtcttttctcttggtccaagcttgcctagaagtcataaggataaaaagtgcttgaattccagttgaggtcatgtcatcatagtaaagagtgataggaataagatttatttggaaagtggtggcatgttgaagcattcaaaggataatactcaaggtaaccggtcaagactgtatatccttggagggttcttcgtccttgtcattttggccattgtctttcactacatttggaatgctaaccaggatgaccaaagtcaagaccagctggccgagacagaagtaagccaagcagaccaggaagttagggaccaagaagctagtgacaaaggaaccacccctgaagctagcaaccaagagagagaccaggtaagggatgaaaaaacagagcttcgaatatccctggtaggggatgtcatggtccatggaccgcagttagaggcggcctatgatgaagtaagtggccaatacgattttgacccgacctttgcccccgttgcccccctgattgaagagtctgacctagccctggccaacttggaaacgaccttgccgggagaagaatttggttacacaggctaccccctcttcgcaagtccagattccctggtagatgccttgcaagagtccggttttgatggtttgttcaccgtcaataaccactgcctagatacaggtgtccaaggcctagagcggacagcccaagtcgttgaagacaaggggatggatgccattgggaccttccaggatccggaccaagcccgggtcctccacaaggatattgaaggcattaaagtggccatcctagcctataccgaaatggtcaacccttcccaatttacgacggaatcgcctgaagacatgactccttacctgaatttgctaagtgaagaccaaattttagctgacctagacgaagtagaagaggatacggactttaccttggcctatgtccactggggcgaggagtacactgatcaaccgactgctaaccaagttcattatgcccagtttttagcccaagctggagttgatgcggtcatcggcagtcacccccatgtcatccaagaaacagaggtcattgaaggagaccaagaggagacctttgtcctctattccatgggcaactttgcttccaaccagagagtggaagccctgggtcaggattatgcagctaccgaggatggggttattgttagcttaaacttggtcaaagaccccgagacagggaaagtagacttggctagtgtagactacgatccgacttgggtctggcgctatgaggagggtgaccagtatgcctaccgggtcttgccgattgagtcaaccttagaagaagacttaccgcaggatgtggtcagccggatggaagcttcctaccgaagaagcttggaaaggttggagcccaaagccgaccaaaacaaggaatctgaaagccaggttaacccagatgacccagaagccggtcaagatacagaagaccagtctagcccagacgatcaagaaagtgaccaagaaatggaccaagttgcctaaagcaaaccaggcctagtggaaagactaggcctggttttacttatacttgcactatcctttaactgtttcaggaaaagataacatgctccatattatcttattgtttgacttcttgagccacaaattggtctaagacctggttgatggtttggccaccgacttcatttaattcatagtggacccgggtgtggggtttattgatgttaatgacccggctgaggtcaataggggtcccgatgatgacggtatcacagtctgtttgattaatggtttcttctaagtctttgagttgctggtggccatagcccatggcagggagtagctggccaatgtctgggtatttttcaaaggtgtcttttaacgaccctgccaggtaggggcgggggtcgataatttggcttgcttcaaaacgctgggctgccacggtaccggccccaaatttcatttccccgtgggttagggttggaccgtcttcaacgatgaggacttttttatccttgattaagtcggggtcatctacactgatagtggactcggccttaataatctgggcctgggggttaactgttttaatattgtcttccaccgtttggatatcttcagacttggcagaatccaccttattaatgacagccagatcagccatttccaagctcacttggccagggtagtagctaatctcatggccaggtcggtgggggtcagcaatggtaatggccaggtcagcatcaataaaggagaagtcattgttaccaccgtcccacaagataaggtcacagccgtctgggtcgttttcggcagcgtccaggatagcttggtaatctacaccggagtagatgatattcccccggtcaatatggggttcgtattcttccatttcctcaatggtgcaatcatacttgtccaagtcagctaggtcagcataacgttggactttttgagccaccaggtcaccgtaaggcatggggtggcgaatagcgaccacttttaagcctaagtctagcaagtgctcaatgaccttgcgggagctttgacttttaccagacccggttcggacagcgcagacagaaatcactggtttcttacttttaaggctggtgtgcttaggtcccatcaacttaaaatcggctcctgcactattaacctttgcagacaaggccatgacatcatggtagttgacgtcactgtaagcaaagacacattcatctacatcgaattccttgattaagtcaggcaatttctcctgggtataaatgggaatgccgtcagggtagaggtctccagctagttcttttgggtattttcggtcgtcaatgtcggggatttggctggcggtaaaagccaccacctggtagttgggattgtcgcggtaaaaaacgttgaaattatgaaaatctcgtccagctgcaccaataatgataatcttttgtttttccatttttacacaaccttttctagtcaaaataatgctttttacaaggccctagggtataaaaaaatcccacccctaattgcttagaggtgggactaaagtctcacggtaccactctaatgggtctccaagatccatcaatgctttggccttgttcaacccactctgtctttaaccgctagatagcggggttagttgcctaaccagtctccaaagtacggttcagttaactagacaactgcaagcttccactctgtcttgcatcgctgtgaagtccggtaaacctactctctttttcatcgactatttttattaaaaattcagtatgatttaattagctagcttgtcagttatcttaacaccggtttaagatgaagtcaaggcctacactcaatctttttcttgcccttgactagaaaggaggactgctttaagcctggtcttccaaccaacgtgttgcaatgtgagacagcatagcggaagcttttggcaggatttcttccccgaaaacgacttttgggtggtggacagggtagagtttgccatcttcggcatccgggttaggtgtcaagatattgaagaaaaaggctggaacttggtcagcatagtaggcaaagtcttctgaagcgtggacctggccacccttgtggatgtcaaactccccttgagaaatttctttgaggtaagagatggctgttcgagagaagtcaccatcattgactaggactgggcagtcggagaggagttcaaattcagcacttccccggtaagcttcggcaattttttggacaatttcgggtagccgttttttgatatagtccttactttcgttggaaaagcctcggacagtcccttctatgacagcctcacccggaatcacattaatagctcccttggcaatgaatttccccatggtcaaggttgcactgcggtcaaaggggagctcccggctcaatatttcttgggctccgttgacgatttgagccccaatcatgactgggtccacacctagataaggggttgcaccgtgggctccctcccctttaatccggatgcggaagttgttggcaaaggtcatccaaggaccttcctcaacaactaggatcccttgctcatcaatgtttggggcaacgtggaggcctagtgccacatcaacttttgggttttctaagataccggcatctaccatagccttgcccccgatcaagagttcttcagctggttggaagatgaacttgacatgtcccttcagctggtcttcgttttccttcaagagacgggcagcagttagcaagacagtggtgtgcatgtcgtgaccacaggcatgcatgtaatcatttttggaggcaaattctacccctgactcttctttgatcggcagggcatccatatcggcccgcaataggatggtcttaccggtgtctgggccaatcaaggcggttaccccattttctccaatatcttctggctccagtccatattcttttaattttttcttgataaatttagccgtctcctgggtttcaaaaccggtctctgggttctggtggaggtgacgtctggtggcaagcatttcgtcaaaatggctttgggcttcttttaagtaattcatggctaattcctttctatttttggatttgcattttaaagggcttacaatttcttggacgactttcagccttctttagcttggtcagtagtcaatcttaagtagactccaatgtcagtaaactttggccactcaaacaagtatggcttagctctcaagcaataagggaaggttagcagcctcttaggctagaagacctccttttcttgtagatcctcgatttccttaatctcaaccaaggggctaaggcatctttatttatagtttaaaattattagcattatttgtcaacgctttcatatacaaattaaaaaccagcctagattttgatggctaggccggtttgctagtctgggtcaattaggaggttctcaaaattctgttatctttttgctttggcttagcctggcttgttttttcctggaagggttttgagcaagcggaggccgtttagaatgaccaggagggtagagccttcatggactagaacactgagggtcatggtaaggggacccagtaagctggtggtaatcaagatagcgactactgctagagccaagtcaatattttgccagatgaccctgtccattttttggctgacctggtgggccagtcccagggtggaaaggtcctggttcattaggaccaggtcagaaacatcaatggctatatcggttccttggcccattgcaattccgacttctgcctgattgagggctggggcatcattgatcccgtctccaaccatggcaagtcggccaaatttttcttgttgttccttgataagagctgccttgtccccaggcattaccccagcatagtaattgtctatccccaagcttcggctaatggcttgactggtctcctggctgtcaccactgattaaagtggtatggactccagcttgtttaaagtagtcgatcacttccttgctggatggtctgatcctatccatgagggcaaacaagccaatgaccttgtcgtttagactaaggtagaccaccgttttaccctcttgagaccagacttcctttaactggctaattttggactcagccattgggaaggagtcaggccggccgattcggtagttgtctcccaaatagttagcagataggccgcgaccgacttcctggtcaacctggatatttaaactttcttggtctggaaagtagttcacaatagcctgggctagggggtggttgctttccttttccatggcagtaaaaatttggatcaatttagcttggtttaagtcgggattcaaatagtagtcggttaattcaagttctccctgggttaaggtcccggtcttatcgaaagcgatggcatcgatgtcagcaagttgggacaggtagtgacttcctttggataggaggcctgacttggctaggtttgaagttgctgacagggaggcagatacagtggcagcagccaaggcacaaggggaggcggctaccaacaagacgagacctcgataaagactctcaggccaggttaagttaaacaggacggggcctagcagggccaagaggagggtaatggcaaggacagagttgacatagattggttcaaaatagtcgatggttcgggcccgtttggtgatatggtcttggttttggctaaccaggtctagaatttgggcgaagacgctatcgtcactaacctggctgacttccatggtaaaagtggcctgattgttgatggttgaagcgtaaaccgaatcacccggtcctttttcctgggctaggctctcaccattgatggccgattcatcaatagctgtttggcctttgacgacaaagccatcaaggggaacctggtctcccttttggacctggaccaagtccttgacctggacctggtcgactggaaccaagtcgatttcacctaggccatctaaacgtctagccaatttgggggtcagctcaactaatttgctaatttcttttttacttttgccttcagcatagtcttctaaaaaatgggctcctgcaaagatcaagataaggagggccgcctccagctcttctcccaggaggatggcccccaagccagctaaccccattaggatgtgggagttgggtttaaatttttgggcttggattgaatcatggtaggtttgactgatgccttctccgataacctgaaatcctgcacttaggcaagccaagctataaaggagggcttgcaggctagggtgattggtcaggaataggccgaaaatagctagacctaagccaataaaataaaaaatgacggctagggagctgtgtgggtggtgatggtgggttgagtgtgtcttgctggcagtatgggtagccatgtctattctcctcatctagtagtagcgtttatttctttatatgaacatattatcatatataaatattaccagcaagaggaataagaaaatccccccagctttttaaaatgctagaaaagtgggggaaactattggccttgtcatgatttgaagtttggggtctggtgaaatttaaagggcagtcaagacaagagaattagcctatcaatcgtgtaaggcatgctcgatagccttagacaagaggtccaagacatgttggtcgtcgggggaataatagaggctggtagcctctcgtcttttcttgactaggttcagactctttaaattccgcagttggtgggagacggtggattgcttaaggtcaagggtgtctgctatttcatttaccgagcactcatggtgggcgaggaggtagaggattcgaatccgggttgggtcgctcaaggctttaaaagtctgagctactgtctctaaactttgggagcttaattcactgaaagcttggtcttggcttaaatggtcagtcatcagtttatcctttcctgtctaagtttatttactaattaggctaaatcataatcattactagtatagcatatttctttccttagtaatatgtctagacttcaatcctagccaagagggtccggctaaaaccaataggatctcttatgggatagaattaaacgataaagccttttagtcgttattttaaaacaattgttagcctatccttgtcttgttttcctaaataggccaaattataataggggtactggagggattaatatggaattaattagattgatagggatccttattattgtaattggattcgttctaaaattagataccattgctgtagtcctcatagcaggcctggccactgccttggtatctggcatcacctttactgagttcttaaccttattaggagaagcctttgtttccaaccgcctggtgtccatcttcttcttaaccttacccatgattggattggttgaacgctacggcttacgccagcaggcaaccaagcttatatcgggtattaaggggctaacaccgggtcgcttcttgtcgatttatatgtttgctcgggaactagctggattcttttcggtccgggtttatggccaccctcaatttattcggcccttggtagaacccatgtcccagtcttccgtccgggctaagtacggggagccgactccgaatcttaaggagaaaattaaggctcggtcagctgccatggaaaacctggggaacttttttgcccaaaacaccttcgttgccggctccggtgtcctcttgattgcagggactatggagtctttgggctaccaagtctcagccgtcagtgtggcccaagcttcaattccggtagccttgattgctttagtctttgttttgctttctaactatttactggaccgcaaaattgaccgagcttacaaggggaaagagccacaagtgccaaaagaaagtgaaagagaggcttaaccatggaagcagtatctgaatacttaattgaatttttctttgttttaaccggcttgctcatggcctatactggtgtgcgggtggccatggaccaaaaccacccagcccggtttgggactggcctcttttggttaattctggctgccacttttgccttgggccaagtcatcccctatgaagtaacgggggttttaatcttgattatggggggattgaccctcttcaaccaggttaaaattggtccaattaccactgcttccgaggaagagtcaaagggccacagcgaccgtttgggcaaccggatttttatcccagttgtctctttagctcttatagctattttactagcccaatttacccccttggatggccaggctgggattgggattgcttctatactagctattttgattggtgttttggtaacccggtccaagtttaagacaagtctggatgaaggggaccggatgaaccggcaagttggaacagtgggtatcctgccccaactcctggctgccttgggtgtcatttttacgacagctggggtaggggaggttatttcttccctgatttctggaattgtaccagcgggtagccccttgttgggagttaccgcttatgtcttgggtatggtggttttttccatgattatgggcaatacctttgcagcctttaccgttatcacagcaggggttgggatcccctttgtcattgcccagggagcagacccagtcattactggggctttggctatgacagctggctactgtgggaccttaatgactccgatggcagccaatttcaatgccttgcctgtagcccttttggagatggacaatcccaatagtgtcatcaaggagcaagttccttatgccttggttatgattgtggtccatatcctcctcatgtacttctgggctttttagttagataatgaataggaaaggaaggtcttaccatgaaaattttagtcacagcctttgacccctttggtggtgaagagattaacccagccttggaagccgtcaaagacttaccagatgagatttcagaagctcaagttattaaattagaaataccgacagttttccacaagtcagccgacaaggtcaagcaagccatcatagaccacgaccctgatgtgattttagccattggtcaagcagggggccggtatggggtaaccccagagcgggtagctatcaatgttgatgatggacggattgaagacaatgaaggcaaccagcccattgacagccccatccaagctgatggccagcccgcttacttctccagcctgccaatcaaggcgatggtggaagccattaaggcggaaggtctgccgtcatctgtttccaattcagccggaacctttgtctgcaaccatattatgtaccagatcctctacatgattgacaaggattttccgggtaaaatcggtggctttgtccatgttccttttaccagccaacaagttgtcgacaaggccaaccagcctgctatgagtttggctgatatcagccgggccttgcaagcagctatccgggctattgtagaccaggatggcaaaggcgatatcaaaaaagttggcggggctatccactgatttaagttaaattagaatacaagcaagacaaaaaggcaagcttcaaacttgcctttttgtttgttcatttattggtaaacatagtggttgggttcgatttccaccaagtgaccatcttctggatagtcctccgattcttgcaagtccatggccactctttgttggtcttggctctgatcttctgggtcagggatgggaatggaggccaagagtcgcttggtgtaaggcaggatgggattgtcaaaaagggtggtggtgggagcgagttctacaatccggcccttgtgcatgacagcaatccggtctgacaggtacttaactgtcgccaggtcgtgggcgataaagaggtaggtcaagtccaattgctcttttaggtcattcaagaggttcataacatccatttgaatggaggcatcaagggctgataggggttcatcaagaaggatgaattcagggtctaccgccaaggcccgggcgataccgatccgctgtctttgaccaccagagaattcatgggggtagcgttcggcataatcagctggcaggttaaccatggataggaggtcaacaacccggtcataccggtctttcttattttgagccagtccgtggatatctaaggcttcaccgataatatcgacaatcttcatccttgggttgagggaggcataggggtcttggaagaccatttgcatgtttttgcggactgccttgagttcctttttggacaagttgttcatggaaaagccagcaaatttaacctggccagcttctggttggtgcaagcgcaagatggaccgacccgttgtcgacttacctgaccccgactcgcccaccaaacctaaggtctctcccttgtaaatatcaaaggtcaattggttaacgggcttgactttctcatagcggttgacgggaaattccttgtaaagttttttaacttcgattaatttttccttgtccccattgaggattttttggatccgggccaggtctttaggagtcttttcagttttgaggttggggacagcttctaaaagacgtttggtatagctatctttcggatttttaaagacgtctagggtttggcctcgttcaacgatatggccatcttttaaaaccactacccggtcacatatatccgcaacgacaccaaagtcgtgagtaatcaggaggatggccatgttccggttcttttgcagtcttttaagtaagttgagcacctgggcctggatagtcacgtccaaggcagttgtgggttcatcggcaataattaatttagggttgcaggctagggcaatggcgatcatgacccgttgccgcatacctcccgagaattcattggggtattggttaaaacggtagtctacccggtcaattcccacctcttccataatactcttaccccgttggttggcttctttagtggataatttttcatggtatttcaaggtttccgtgatttgcttgcccacggtcatggtagggttgagggaggtcatggggtcttggaagatcatggaaatttccttgccccgtatcttttgcatgtccttttcattcttggagagcaagttttggccattgaagtaaacaatagacccatcatttacttccgcattgggggctaatagttgcaatatagcctttgatgtaacgcttttcccgcttccagattcgccgaccaggcctagggtttggccttcttcaagggcgaaggagacctggtggaccacttcttgggtctgggttcctgtagtgaaggaaacggacaggtctttgacatctagtaaagctgacatccaatactcctttctattggggtcataatactggactaaaatgatactaaaaataattttaaagaaataaaactgctctgacacataactcattttgcatggccagatttttgtgttacatttttaataagctaaaaatttcttatcaattattaattatacattaaacgagaggtgatacaagtgcaaggaagtgcaaagtcgacctggctagctgacttggcttatgatttcaagttgatcttgcaggagagaacttggctggtaatccttatcatccttggccccatttttcacttgtttgcttttatcaagtacttaggagtcaaaaaagatgtcaagcgtcaagagatgaccgaagattacagccaggaagaactaaataaattgagagcggaaatagaagaagaggagcaagcaaaggaagactatcttgcctttactcgaagccaagaggatcggcaaaagcgggtggaccagattattcaaaatatggtcaaaagacggtccagccaacaaagccggcagagcctaaccctctacgccgaagtttgccaagatattttatctagcccttggggatttatctttgccctggtcttggccttgcctatgaccttggtcctcttagtcttgtctagcccaaccctaagctttattgtgcgacggattctcttgatgcttttggttatagtaggtgttgttttcatcgtcttcaccctcttatacctgtcaccatctgacccggccgtcaatatcttgggcgagcaggcgacagatgctgagattgccaattttagacaggtttacggtttagaagatccttacttagttcagttgttccgggccattgctggggtctttacatttgacttcgggaataccctgcaagggaatatcagcgtcatggctgatattgtgtcgcgctttccagtgaccttgaccatgaccttttttgccctcctattagccattattatcgccctaccagctggaatttatgctggcgttaaccccaacaccaaattcgactacatttttatgtttttcgccttgatagggatttccatgcccaccttctggctaggccttctctttattttggccttttcagttgagttgggctggctgccggcgacttacaaccccattgacaatctctcattgattatgcccattatcgtcttgagtgtgactttgatggcggaggtctcccggatggcccggtcctctaccttagaatcgatcaatgaggactatatcatgacggctcaatccaagggtctgccgagactgcgggtaatcttgcgccacgtggtgcccaacgccctgatccctgtaatcaccattgttggcctccaattctccgccatgttgggtgggtcagcggtcaccgagcaggtcttctctgtaccaggtattggctcttacatcgtagacaagcagttcctaccagatgtgccagctgtcttgggtggtgtagtctatattgcagtcgccttgtcgattgtgaaccttctggtagacctcttgtatagttttattgacccacgtatccggactaaaattcaaaacggacaaatcaaataggaggtggcaaagaagatgtctcattaccgacagaagaaaattatcaatcaaatgacctttaacaaccccatcttgattgtcatgaccctgatcttagccctcatgagtatttttggctcattcggcttgggtttatggctttacaccggcttaaccctggtcttaactggggttcatatcatccttttaagaaggtttgaaagggaaaaaggagacagtcccaaaagcatgaaaggattggcctgggtcttaatagcagggcttttaatagggaatttgttcacctttacctctggggccacagtggttaaagaaaagatcaccacttcctaccaatacagcatctatatggtggtggcagatgttttcgttatcttagtaaccttaagtaacctctttaagccttttgtagcagaccactttgtgaccatggtcatcctcttaagtctagttttagccttccacctctttgtccttgtttggggacagggctacaaggactttagtcagcctggtcaaatcaccttgcaagttcttttaattgccagcctcctattggggaacttgtttgccctcttggtggcaattggcctccacagggagagtcaagaatttgaatacgccagacgtccgagttccgttttagataaattgaccaataatgctgcagccttgttgggacttgcctttatcatctttttagtgatgatttccataacttcttactggtcctttagcagcgagtttgccattgttaacgactatgacaatatcttacgcaatccttccttgacctatccattcgggaccgacaactttggtcgggacgttttctcaagagtggttcttggggctcggatttccttctttgtgggctttttgtctaccatccttcccttctttgtggggggacttttaggagcagtgtcaggtttttatgggaacaaggtagacaatgtcattatgcgacttttggacgttctctatgccatccctggtctagtcttagccattaccattgtggcagcttttgggacctccattcccaacctgatcttggccttaagtatcggggggattccagcttacgccagaaccatgcggggggatgtcctccaggtggtcaactatgaatatgtagaatcctcctatgcccttggtcaatcggattggaatatcatccgtaaacatatcattcccaatgccatgtcatccatgattgtcattgcctcagtggaaattgggaccgccgttatcgcagtctccagcttgagtttcttgggcttgggcgttgaaccccaagttccggagtgggggaatattttacagacaggcagtgaattcctagaaaccgacccccacctggccatattccccggcattgcaatcattctgttagtcttgtcatttaactttttaggagatggtttacgtgatgcgacagatccaaaaacaagataagtccctaatccagcgcttaaaacaattcagtctttgcctaacccccttactcttaactggctgtgccagtttacagactgaatctgacctagcctccaaccaggtggaagggcaggaaattagccaaaaagatgaaaccattgaaattttaaccaccaatgactccatgaccagtgccaatgtcttgcgggaccagctggtacgaaatggttttgacgtggaatttaatatccaaccagatttttccagtttattggcccagcacgatgtggggaactttgatattaccatgatgggttggtcaacggtgacaggcagtcccgattatgctgtccggtccatctaccactcccagggggattcttccttgattgaagacccctatgtggatgaattgattgaccaagcggcaactgaattgccagaggactaccaagccacctacaccgaattggaagattatgttgtggaagaccaggcctatgcggtagggaccgatacccggtatgaacccttggcctttaaccacgaggtcttagacccagacagcattgtcaactacagtgcccgagagattccttggaatgaactgtcctatttggatgaaggtcaaaatgaaacaaggcccttggtaacttcccagcagtatgtggaaatgacctcccttgaccctatccgggcaaatgatgcctctgttgctgcggtcaactccaatatgtatagccgtttggtgaacttagacgaaaacgatgaagtgacaaccgatgattctctctcctataactatgtcattggagaaggcaaccaggactattactttatcttaagagacaatgtcaactttgctaaagtagaagacggccaggtagaagacaccggtgacttggttggcggggaagatgtcgtctactccctcaaccgggctgcaaatcctgactccgtgccggaccacctgtcttattccttatttaccatggtggagggggcagaattggtgacagacttggatgagctggctagtaaccagtctagccaaagcgacgccagcctcttagaagaattagaatcaggtttagaccagccgatccaagccttggtcgaaagtgacgatgaggtggacaaccaatcaggctactaccaggtagtgaagttgaccactgaatttcctttccctcaagtcctcaaccatttggcccacgtggcatcgggcattgtctccaaagaccaggtcgaatcagtcaatgacttcgaagttgaagattacaaccctgctgaagaccgggcctacggggaccaagctgccttgatgcgggggggcagttacgacaaccacctctatgctagtggtccttatattatgatctaccgggacaatacccaagccatcttccagaaaaacccagcctataagccggatagtgacgaggaggctcagattgaccaggtcaccctccgattgatttcggatgccactagctccctatcagccttacggtcaggagagctggacctcttgcaggggagtgaggaaatcttgccagtcaagtatgaagtgatcgaggaagaaaaccacctcagcctggatacagttgtgggaacaggggtcagctatatccagtttaacctccttagtgatgaccggcccatcagccagtctgccaacctgcgtcgggccgtcctttacaccatcaaccaagatgagatgatagcgattgagcaaggcaacagcctgccagcccggtcgaccttgacccctataatcgatacaggcaagcagggcatagaggcagactcagaaaaagtagagttctactataatgaatacctcaatgaataagtcctgaaggaaaggcatgactcccaaagctaggagccatgtctttttccatgggtcagctaagacttaattctcaagggaaatgagctggggtcaaaaaagtttgacaatcaaagtattcagtgatagggtttaagggtattagaggtaggtggtaggatggaccgtttagaagaagcgctcaagacctatattgccattaagcggaccaacaaccgtatgacggatgcagccaaggcggatgttacccaccatggtttaaatataaatgaatttgcggttttggaagttttgtaccacaagggtccgcagcgcatccaacatattaaagagaagattttgattgccagtagcagcacgacctatattatcgataagctggctgacaaaggctatatcgaccgggttcgggaccaggttgaccgccggatttactatgcccaactgacccggtctggtgagcaagtaatggatgagatttttcccggccatgaaaagatgatcctaaatctctttgaccggatggaagaccaggagatttacttcctaaaagaactacttaaaaaaatgaacggctatggtcagtaagggtcttggtcgtcttattctgatttctagcaagctataggttggggcatgaaagaccatgtcttagccttctttttacttgcttggacctccaacttaaccgtatacttacttgtaagaggtgtttaagatgaaagcattgattaatatcgactatacaaacgattttgttgcggacgatggggctttgaccagtggcaaaccaggccaggacctccatgactatatcttacaaactaccaaggacttttatgaccagggggactttgtggcctttgccattgacctccaccaggcaaacgacccctaccaccctgaaagtaaactctttcccgcccataatattgaagaagtgaaggccggaacctttatggggacttagaagactactaccaatccatcaaagatgccagcaatgtttactatacggacaagacccggtactcagcctttgcggggaccgacctggccattaagctaagagagcgggggattacagaagtccatttactaggagttgtaaccaatatctgtatcctccacacggctattgatgcctgcaacttgggctttgatattgtcgtccatcaaaagggtgtggcttcatttagccaggaagggcatgactttgccatggaccactttaaaaataccttaggagctaagattgtttaaagctaaaagaccagggaatcatctttattaagcagattattatttcaaggatgttacagttttacagacttttgtaaagaatccattgattgtgtcaaaacaaagtcaatcgggctaaggagcaatgacaattgccctttagcccttttctttataaatatttgcctgtagtatattggttgtcgctgatgagactagcgaaacggaaaaaacaaaaaggaaatatttataaaggagttattattacatgtcacttaagaaaagattgatccaagccggttctggtttagccctagcaggtgccttgactttcttcggtggtcaacaagcccaagccgcaacttggaccccaaatactgttgctgatattcaaaacgtcatcgaagaacaagcagccaaccaagacggtgtcattaaataccaattccaatggggcgacactctttggggtgtatctcaagcaactggtattagcttggaccaattgactcaaatcaatgatattcaaaatgctgacttaatccacgttggcactaccatttacttaagcaatgacaattctgttgtttcggtagaagaagaaaatgaaattcgctcctacgatgtttcggaagaagtcgttgtcgaaactgaaacaccagaagatgtttcagaacaaactgaagctcaagaagttgaacctagccaagaagttgctggtgaagaagcagtagcggaagaagagccagtagcagaagctcccgctgaagaaagtactgcaaaccaagaaagcacagaccaagcacaaggtcaagactacgctgttgaaaacgtcagctacaatgagccagctcaagcagaccaagcttctcaagctaaccctgagccagctccagcaccagcaagcggtggcgtttactccattgcaactagccaacttggtgcaccttatgcttgggccggaacttctccagcaggctttgactgctccggtttcgtacactgggtctatgcccaagcaggccgttccattcctcgttcaactggtggcctttactcagctgctacaccagtttctaacccacaagtaggtgacctagtattcttcggtaacggtggcgtttcccacgttggtatttacgctggtaacggccaattcatcggtgcccaaacttcaaccggtgttgcccacgctagtgtccactctggttactggggccctcgtttcatcggttacggccgcatctaatttccttaatagccatacttttccctctggggctctgcctcagagggtttttttataaaaatagccttcatccttatttgaactggctttgaactagctttgtggtaagatagctttaagaaaatttcgatttgacttcctttaaaataactaacgttttataaatgatcgctatcggtcgaaacggattaaaccaaagcaaggagatggggaagatgagagtcatgttgattgaagacgaccgggacatgtcagctcttattcaaatgtatttgcagcctgaaggttgggaagtagacgtttttcatatgggcaaggaagcagtcttggcctttaatcgagatagctaccagattcttttgttagacctcatgttgccagatatgactggctttgatatttgccaggctatacgcaaagagacaaccattcctatcatcatgttgaccgcactggagcagtctatccacaagattcaaggcttaaatatgggggcagatgactacattattaaaccctttgatccaggtgaattaattgcccggattagggctcaattaagacggacctatgattacgtcacaaatcctagccttgaggagactgaccaaagaagggtaaaacatttaactttaaacaagaaattccatcaagcttactatcaaaatcaagaaataaaattaacgcccaaggaatttgctattttatggttgctgatggaagatcctcagggtgtatacagtatggatgatatccacacgaggatttggggggatgcagtcctagatggtgaagttaatcctgtcatggttcatgtcagaagaattagaagtaagtttgaaaagatcggtgtcgacatcatccaaaccgtctggggagtggggtataggataaatgcttaagaaaaatactttttttatagagacgatcttacttcaaatactttggctagtagcaggtttgatcttttcgtatattctcatcaacttattggacaacctggtttttgcaacaattgaccataaccaaggcttaaatttagctcaaggagtgtattatgaagcaaggccttatattatgctccttatcttaccaagtctgattgtattgggggcttttgcaatccagtataagcggttcaaaaagtatcaaagctattacgcttctggtatggcctacttgaaaggagatgcccctagcgttgagaccttccatgaatcaatggctgatgaccgcttaacctttattaacttgcggcaaaagcaagttgatatggaaagagattaccaaattgcctaccgagagaaaacggatttactgacctacctagctcacgatattaagacccccttagctaatatgctggggtataccaaactccttcacgaggaagaagacctaagccccgaccaacgagggaaatttatccaggttatttatgacaatgccaattatctgaataaactgacggaagactttttcgattatttaaaattcagcctcaatgatattcccttgcaaattgttaagctggatgtgacagttttcttctcccaatgggctgaagaaagggaattaagcttaaagaataagaccctgcaagtgacttttagcaattgccaggatataacccttcagactgacccccacctgctcttaagggttatggataacctgatcaacaatgctcaaaaatatgccttggaccaatcccaaatccatgtttatgttgctagggacgaaaagctactctcggtccaagtgatgaatgaggtggatcaagatttgacttttgattggtccaaagccaagtctcgtttttaccaaggagattattctaggaaccgactaatcaatgaaggatctggactaggcttaactattgttgatgatatcgtcagacaccttggaggtcactttgccatcgaccaaaatgaggctaaagtgacagccagtctgaccttccccctcccttaaaaagcaaggaaaaagaaagaattaagacagtaaaatgtaaacacttgagctaagagctagcctatactatcaattaggttagctcttattgttaaccaataatacagaaaggaataattgaaaatttcaacggaaagtagtgaagattgtagatcatttaaaagttacagtagtttgggatttataagatataaaggagaaaactaatgaagaaaatattaactaccattttattgtctgcaacattgttgaatactggcctagttgtttcagcaaaagataatcaaataccgtatgtagagggtctagggtatgaaactgatattattcagcaagaaacaagtacagtgactttatataaaaccgatagcggatggaaagattttttaggcggaagatggagccatggtgttaacgaaagatacgtatggtctaaatacgaccacaatagtaaaacacataaaactaccgttcaaggagcaggtggtaaattatcttattctggttggactaagccaggtaaaagagcttctgcttcatgggagaaagccttatttggcaacaaagcttgggctgatgtaaagtagtgagaaattaatagaatgtttcaaggcacaatattgtgccttggagctactattaaaaagatagtattcaagacagcgaggaataaaaatgaaaaaaacgactgggatactgaccgtagtcctcatggtggttctaagtctgggatactttatctaccgtgacgataccgtcatgaaacaagtatttaaagaatttgatactacagttaatattgtgagcaatccagaacagataaaacagaacatcgaaacaatccaggtcctagctcaagcaaatgatttgatctttgtaaaacaagtttctccgccaaaggatagtccttatgccaagcaagagatctatttttatgttagtggtcaaggccttggaccaagtgaaaagtcaagccaagaccagcctggtctaggtcaatttgacgcagaacatctatcaactctgttaactcgaaaaaaactgcaagctaggccctttgctgagatcaatccggaagacttcaatggggactaccaggttaaggggaaagcagatagggtccaagattttgtagaccaattaaaccaaaagaccagtctagctattcaagcgaatattgatcccaacttttcccaagttagtcaatatactgtcaaacaggccttcatctatggtctttcagtctttgttttggctgcaagtttgatcttctgcttcatcatgtataatagcactctatccaaagagatatctgtagtgaatttattgggctacaataaagcagaattttcaccccacaagtccgccttccttttactagggcctagtttgctatcccttttcttatcaactttgctgctttatttcttcagccaaagcaagtccttgctccgttttatccttgcagtcaaagatttttacctcttctttactataatagtgggccttttgttcggcttagaatgtatcctcttaatgtggaaagtgcaaaaaagcaagacccttttatggttaaagggcatgcgcacttatcatagcaagctatttttgtttgctaagactgcttccctcactctagtcctctatcttttgaccctatcggtttttggtctagcaaactatttaagaatgcaaccatacttggcaagctgggataaggcacaagcttacggtaatattgcttgttcttggcctatgtcttatgaagaaaacgaccaaaaattccagagtcagattcttcctaacctaaatgacttgtgggaccaattagacgaccaaggggctatcttgtttgaaagtcccaatatgactgaattaaactcacagctaagggaagaccaagactacttaaatagtctgccttttaatgggaaatatgcctatatcaatcaaaattacttggatgtcagctccttattggatgacaagggtcaagttttaaaagattatgaaatgaaagataaggcttggactatctttgtacctgagtctttggacgtaacagaagaagaccgaagagcaattaggcaggaccattttgaccaggttttagataaagaagcaattaccgaagactacgtttttatccaagacaaacaagaagtgtttagctttgatagtcggcaaaagattagtgaaggcaatctaagggactatgtcttcatcatggtccagggcagtgaacttgacccggcttttagcattaaattaccatccctagtcaatgctagcttccatccttatctcacccagcctcaacaggcctatcagagcttgaaggagaccatcgatcaaaccaaggccagtccgtatatcctctatgtttccaatatttttaatgatatgacctaccgtattgaagaatataaaattgagagttttatttatctctttgccttcattttggctctttttatcttgttttctgtcctagctatcgaccgtgacaactatttttatagtcagggacaaaggatcgaggttttaagacttttgggctacccgcaagtggccatccataaaaggaaattagttcaaaacttcctcctttatggcttaagtattatggccctaagtgtctttttgcttgccagtgactacctgtcttcctatggtctttacagcccagagggtggttggctaaaccaattctttcctatactgaatctcttggttactttgtgcctttacctatctttcttgttggaatacaggtcttggaagaagagggagagccggatggtagaaggattgaaggagggaacttaaatgagtttaaatccactgataaaaatgactgagctttccaaacaatatggctcgcacacgattctagaccaggttaacttagaggtctatccgggtgacttgatttgtatatttggtgcaagtggtggaggaaagtcaactttattgaatatcatgggaacattagaagactaccaagctggtcacttggagtgttttaataaactggacccagtgcaaagagaaaaaaacaagtgaattgttaagacgaactaaaatagcttatctttttcaaaacttcgccctagtggataatatgacagttaaagaaaatatgatgctagcagtgaaatatagccagtttgaaagcaaaggccaagccatagaccaggcccttttgaaggtggggcttgaagacaaacaagaatccaagctttatgagctttccggaggacaacagcaacgtttggccctagcccggaacatggtcaaaccctttgacttgatgttagctgacgaacccactgggttattggatgaaaccaacaagcaaatggtcatgcagactttactggaactcaaccatgaaggaaaaaccattgtagttgtgagtcatgacaatgatttcaaaacaatagcaagtaaaaattatctgattaaaaataaaaaagtagaaagggtcctatagatgattaaaaaaataatactagctttagtcggccttctttgtatcggtggtttactattagtggtgacccgtaaacaagatgaaattgatccgggccttgtggtccaaaatgatacaggcaagaattttgaggcagtgggcatcatggttgaagacaaggcagttttaaataagagtaatggagaagatttttacattcctgaagaattgcttaagggtttggatgaattctcactggtggctattaacgatagtggacaagcctggacctccccagcagttaaccctgacggtaagaaggttaccattaaaaatatggacggtggccagctgcacaccaaccaaaaagaaattgaaaaatttgacgaccctttagacatacctaatttaaacgaatggcaaatttatacagagggagatacgattcatggatcatttgatgcgaagacagaccttgcttacaccctttatattttgggcaagggtggtaagttaggcatatcagacactcaaagtggtcaaaaggtggaagctagctgggaaaaacccgacgataaactagactcctggttagttttttcaaaagcttagaggaattaatttcaaacttttcctaagttaaggactcattcaattgaatccctataagcgcttgctatggccatactgcactcaattctaatgtgattgtggtatggcttttcatggtattcaatcttcttgggtccagaatgaaagtttgttaaaataaactctaaaagattgaaaacggtttattgatttcctataataaagttgtcaaataaatagggaggatggaaaatatgtcacaaattttggaaacgtttttaaaatcgaacctggaagaattagaagaaaaaggactgctgacgaccattgatgtcctggaggaccaggggaatggtcccataattaaaattgagggccgagaactgattaactttgcctccaacaactatcttggctttgctactagacaggaactaattgatgctgatattgcagctaccaagcaatatggtgtaggagctggggctgtccggaccatcaacgggaccttagacatccaccgcaagttagaagagaagattgcagactttaaggggacagaagatgccattgcctttcagtccggttttaatggcaatattggggctatcccagccgttatgaaaaagggggatgccatcttgtctgacgagctcaaccatgcttctattattgatggctgtcgtctgtcaggagcgaagattatccgggtcaaccaccaagatatggcagaccttgaggccaaggctaaagaagccagtgaaagtggacaatacggtaagattatgttcatcaccgatggggttttctctatggatggagatattgctcaaattgacaaaattgttgaaatcgctgacaagtatgacctcattacctatgtggatgatgcccacgggactggtgttttaggtaaaggtgccgggactgttaaggagttcggccttcaagacaagattgacatgcaattaggaaccttgtctaaaggagtaggggttgtcggcggctatattgcgggttcctccctcctgatcaagtggctcaagtctcaagcaagacccttccttttctcaacctcactcaccccaggctcagctggggctattattagagctattgacctcatgcaagaccagcccgaattggtccaaaaggtttgggacaatgccaactactttaaagcagaacttaaaaagattggctacgacataggacagtcccaaacccctattaccccagtcattctgggagatgagaaactagcccaagaattttcccataagttaatggaaaaaggggtctatgctaagcctatcgtatacccaaccgtaccactagggacaggccgggtacgtaacatgcctaatgccggtcacagcaaggacatgatcgaccaagccatcaagatttaccaagaagttggccgggaattaaacattatcaactaggaggctaaacatggaaagagtattgattacggggtctttaggccagattgggtcggagttagccgaacgcttgcgtcaaaagcttggcccagacaaggtggttgctagtggtttagagaaagtggcccataacgcaaccgttgaagaggggatctttgaagaattagatgtgatggattatgaccgctttttagaagtagctaaaaagtaccaggtggataccatcgtccacctggctgccagcttgtcagcggtagctgagcgagaaccgcaatttgcctggaacttgaacatgactggactaaacaatgccctggaagtagcccggcaagtgggggccatggtctttgccccatcttctattgccgtcttcgggcccgaaaccccagcagaccagaccccacaggatacggtgatgcgaccgaacaccatctatggggtctccaaagtagcaggggagctcctgtgtgactactaccacaccaagtacggcctggacacccggtccgtccgttttcctggcttgatttcctacaaggttgaaccagggggcgggacaacggattatgcagtggacatttattatgaagccttgaaaaacaagacctatgcatcttatatcgacaagggaacttacatggacatgatgtttatggatgatgccatcgactgcatggtccagttgatggaggctgatccaaaccgcctagtccaccgcaatggcttcaatgtcacaggcatgtcctttgagccagaagagatcgctgcttctatccgcaactttatcccggactttgacttgacctatgaagtgaacccggacttacagaagattgctgaatcctggcctaactccttggatgattctgcagcccgagaggagtgggacttcaacccccaatatgacctagataaaatgactgaaaccatgctgaaaaaactaaccgaaaaatttaaagctgaaggggtagcgatggcagtggaaatcacctaattgcccaccgccagccaggtaggaaggactcgatgccttcttgcctggcttttttgtgtgaaaaagcggaaatgggccaaagtcaaggataaaataatatgcgatataaaatagggttaaccgagagggactttagtcttcttaaataccaatggcttttaagaaaaccactagaattataaaataatatctgttgttcgagaaaaccgtcattaaattatggataacattagtagttaaagaaaaataactgcgagcaagtcaagtaccattgcagctatcataaatgcagaagtctatagtcgtcgttaactaacaagcaagcttaaatcttctgttaagcaatgatcagactcaggtttagcttatgctctctcctaggaaaatacctgtgttcagcccagtcgcttggcttatttctcccctccccaagaacaagtccttgccaagggggtctggcaacttggaccggcacgatcagtcctagactaggagagctggtcattaaaaagaggcaacttcaaacagttgccccaaaaaagtagagtgtctctattaagcggtctgggttaaaaaatgaccatttttttagtttaagcttattgtaagaatcaggactgcatatattcctctgattttggcaggtaggcttctttttcacgtttgagggagtcgacgatttcttttccatctgtgtcaaactggaccatggcgtaataggggtcgtggtaaaaaataaacttgcactggttcttgaagccgtagttgagccacttttccttgccggcgatcgaatccatcgggtagtcatccagtcctggaacccaaaggggattgaggtgggccagggtaatgagcaagtcggctaggtggagaatttcttggtctccctgcttgatagacaggatggaatgccctcttgagtggcctcccgtgtggtggagggtcatggcatcattgagggcatgctggtctgaccaggtagttacttggtcttggactgcttgccagttttccttcttataggtgcctgccgttctcttgttggggtggcggacttcctcccattcaatagcattgacatagatagtggcattcgggaagactgggaacacttgtccatctttcagctcggttagccccccagcatggtcatcgtgcatgtgggtttggatgatgacgtcaatgtcttctggggcaagaccttcttgggccaggctatcaaccaggcgcgaatcactgtctaaaacggcaattttcttgtctttctcccgcattttggaagtcccataagacgtatccaccaggtagtttttagactggtattggatgaggatggggtcaatcacttccggaatttcattgttgtcgttggcaggcattttccggttccacaaggccttggggacagggccgaagagggtgcccccgtctctaaaggaccggagtgtgtctaagaaggttagggagatagggccaaactggtaatgggtattcatggttctcactcctatagggtggcgattttaaaattgtaagcattttcaaaataaaggataatactgccaatgtcaagtgaaaaaacctggcccctagcagggaccaggttagtatatcgttactttaggaaaggcataggctagaccaatggtggcagacattagttaagagaactaagacgaaataggccaggctcaaactagctggcgaactaagaaaaaatggtccaggccataatcaggcgggccatttggcaaacttcatttctgccagttggcctagataagcaaggtacaaaactgccgggccaaggaagaggggataattggcctacatcagcggagcgaaaaattgcaggaagctccgcatgatttgtcggggaaccgaaatatcttggttttcttccaagctaacttgccggcagatagggaagaggttgtcaaaatcatttttcatatcgataatactttgggtattgtaaaacaaaacgccacattcaaaagagtggtggaggctgcggtagtcgaagttgatggtcccgttaatcgcaaaatcttggtcaataataataactttttcgtggataaaaccgggcgcatactcataaatcttgacaccaacttctagcaacttgtcgtaaaaagactgggtggtctcaaagacaatcttcttgtccggaatacctggggtcacaatgcggacatctacccccgacaaggcagcattctccaaggccgaatagagcttttgactgaagataaggtaaggggtttttaggtagatggactccttggcattgtagatcaatttcaaatacaagctctctgaaatttggatccggttggtggggtcatcggcaaaggggtggacatagccacctggtgtcacaacttcattggcacttttatactcatcagggtggaagtccctgaaatcctgggtatcgtcattcaaataatcccacaaagacaggaacatggtggtaaagccccaaacgccctggccttctagacggataccgccatccttccagtggcctgctttctcaacccggttgatatagttatctcctatattcatgccaccggtgtagccaatcttgccatcaaccaccataattttgcggtggtcccggtagttgtattgaaaagtcagccgccaatccaaggggttaaaaaccgaggtcttgatgcctttttcatttaagtaggacacaaagttttcatcgatccgcaaaatattccccacatcatcatacaaaagtcggatgtcaagcccttcttgggccttgtcaaataagatttctaggatttcgtccaacatggtccctttttccaatatgtaaaattccaaaaaaatatattttttagcctggcgcaggtcttccttcaaagcttcaaagaggtcctctcctaggggcatataggtggagtgggtcttgttggagggcaagactttaaaggttttggtgataaaattacttaagtgcttggcatctgggtccatatccggatagtcttccaagatattggggtagtcttttaaactcaggtcaacttttttattaatttcagttaacttctcctcgtagccattccattgggtttgcttcctaagaaagagatagaggatccccccgaagatggggaggaagaggatgataaagatccaagacattttaaattccggttgggtatcgtaattgataatgatggtggcgaaaaacagggaagagatggcgacgagggccaggtagttttgggcagagcttgccaccaatatactaaagagggctagtagcccaagctgcaagaggtaaagcaagccaagccggataattcgttttcgacctagttttgaaaattgcaaagggtcacgtcctttaagtttttagtataactagtatagcactacttttaagaattcttaatattatttgctgattttaaaatcttcttaatatcgcttggcccaagaccgctataatagtggtaagtgattattttaggaggttcaatatgcaaataggaattgacaagctggcttttgcgactccaaccaggtacttggaaatggcgagtctggcccaagcccggtcccaagaccctaataaatatatcaaggggctaggccaagaagccatggctgtccctgaagaaagtgatgatgccgtcagcttggcggctaatgccggtaatttaatcttaagtgaagaagacaaggctgctattgacatggtgatagtcggtaccgaatctggggtcgaccagtccaagtcggcagccagctgggttcatgacctgttggggatcaacccccatgctagaagcctggagatcaagcaagcctgctacggggctacggctggactcaaactagctgtggcccacctagccttaaaccctgactccaaggttttagtcatcggttcagacatagccaagtatggtttggaaacagggggcgagcccactcaaggagctggggcggtcgccatcttagtcagccgtgaccctgcaattgctgtggtcaacaatgacagtgccatgctgaccaaaaatattgcagacttttggcgacccaactacagcgattatgcccatgtagatggcaagttctccaaccaggcatacttgtccaacctagcagaagtctggcgccagtataagatcaaaaaccagctgtctgctaaggatttcaaggccatggtcttccacagcccctataccaagatggggaaaaaggccttactcaaactaggagattatgaagaccagaaagagattgaccgcttgctggcctattacgagcctggtcgctactacaataagcgggtcggtaatatctatactgggtctctttacttgagtttgatttccctcttagaccaggtaagtgacctggaggctggcgaccggattggcctctattcttatgggtctggtgccgttggagagttctttagcattcggctccagccaggttacaaggaaagcttacagcaagttgacttcgaccaggttgtcaaccagcgttcagcattagagatgtacagctatcaggacttgctgacctttagcctacctcaagacggccaaacttacactacagataaaagtcaccaggtcccaggccgttttgtcttagaccgggtggccgaccatatccgttactaccggcgcttggcttaacatggttggtgaaagctaggaggggagtaactagctaaaaaagaggaaacggtcaagtcctattacttggagcggttaagggactggacgattttagtttagttctataattaaattgtgattgtagaatttttgcgccgaagttctacaattggactgtgattatagaatatctattccgaagttctacaattggtctgcgattatagaatttctgttctgaagttctacaattgacttgcgattatagaattcccagtccataattctacaattataaatttacaactttacacatgcattaacagaggcaccagacccaggtcagacgacctgggtctggtgcttttgctagctagtttagtcttcttccatgttcttgagcagggcacgggcagttgctaggttcatttggtcttggttaattaagcggtctgccagcttttggatcttgtctccccgggccccggcattcatggccaaagaccttgcctggagggccatgtgtccttgttgaataccagttgtgactaaggcacgaagagcggataggttctgggctagtcccactgctgcaaccagccgggctaattgcttagcagtaggttggcctaagatttgctggctaacttgggctacagggtgggaggcaatagccccaccaactgtggcaattggcaagggaagggtaatggtcccttttaactgtccgtcttgggtcttttcccacttggacaaggggcggtagtggccggtcaaactagcgtaagcatgggcccccgcttcgattgcccgccaatcattcccactagctaggaccaagccgtctaccccgttcatgatccccttgttgtgggtggctgcccggtaggggtccaggcaggcatactggtaggcctggatgatttggtcccggacagcttcccctgccatgtcatttttgactaaaaatctgggttttacttgacaggaaacagtgacaagggattcagtggccaggttagataagatggacatcaagacctggccgctggttaggcggtcaatttcaggagccagggcttccagcatggtgttgataatgttagcccccatggcttcctggcagtcaacagtcaagtagactgccagatagcttcccatatcctggcccaggtctgagtcaaactgtttgacttgaatgcctcgggccccaccccctcttttaccaattgagggatagctagcattggctaggtcgattaagtcttgctggtggctcaggatttttccccggtcctggctaggttttgtgcttccggctatgaccacttgaccgatcatcagccggttttccttgactgtatggaaaccaccgctttgggctaccatcttggcaccgttgctggcagcggcaatgacagagggctcttcaatagccatggggactaggtagctcttgccatcgagtaaaaagtggagggccagtcccagagggagggtataggagccgatgtagttttcaatcatgtggtcgccggcttcatgggtcaaacccagttcccctgactggagtttacccgcctggtcaggatcaagatagccggccttttctagagctttgaggcgctggctgaggctttgcttgtaaaattgcttgaataagggtaacatggtctcctccttccttaatctataccagaatcaaattcaatgaggatgaccaggccgtccgggtcggtgactttgaaactggttgaactgacttggtttacttcccttaaaccagttagccggtccagtaattggtcaaaggactctttttcgtctatgactaggctaaaggagcttaagccgggttggcctggttcaagtggctggcatttttcagtagtgaaggcattgagggctagctggtggtggtaaaaaccagtagcgaaaaacaaggccccatcgccatcgtatttcaggtcaaagccaagttggtcttggtagaagtgttgtgactgatctaaatcagaaaccatcaagtggatatggccgagccgggttccctccggcaagccgtcgtaagcttcaacatccttctcatccaaaaccccattaacatccaagtccttggtttggctggggatggacccatcttctaaaacaggccacaggtcagggtccttgtcccggctcagttcaatggtattgccttctggatcttctaggtagatggattcgctgaagccttggtcagaagccccttgaatgtccatatttttctgggtaatcatggtaaagaggatgttggccaagtcccttctgctggggaggaggatggcaaagtggtagagaccaggatgagcctgactagttttttctttcttacttgcccgaagttctagcatgggtcggttttccttggctaggcctaagacagcatgggaccgtaagtatctagaacatccaagccaatcttagtctggtaaaaaatcagcatggtccacaaattttggacatttaagaccaatttacccaagtggacctggggggtcaacttaaacgacatcaataatcaaacctttataatagattaagttcattatctaataccctcctggtaaatgcaatccttcttctgactttagcttggccagcttgttgaaaagctttgaaaattctagcttagaacaaaaataagtccagtcaataagcttgaaccgactaggcagtttaggtaagatattacagtgaatactaggaaaaagctcattttgggctttttttctagtgacaagttcatatgttagaggagatgaaaggatccatgaagttccaactcaagacccaggatattattttgaccttggcctatactgctatttactttttgatcattgcggtgtcggctatgctaacggtctttttaattccaggttattcttttatttttattcccattttaattgcccttttggccggtagtgtttactaccttttggctttaaaagttcctaaatttggagccattaccttgatggccggtgtgattggggtcttttacttaattagcggtcgctaccccctagctattttacttagcatattatttggcttgttggcagattggattgctcggaaagggaattatctggattccaagcttctttttatttcatacctagtctttactttttcaaatattggtccagtccttcccatctttgtcttccaatcctcctacaccgaccatatcgaagggactggccagagtgtcagccaggttcaaagggtcttttcttcgattaactttactagtgcccttattgtcttgcttgctttggtcattgcgggcattattggggcctggatcgggcgaaccttaattaacaaacactttgtccaggatgaagccagtggtaagtaagcaaccggccatagatttaaggaccaagttaattttccttttggctgccccacaactgatcctctttaacatccccttttggatcgaaataatcctggtcctactctatctttctctcttcctgttctcaagggactacaaatggatcattttcttcttagtggtttatagcctgcaagtcttggtctttaacctacttggccaagttaatctccaccccttcctcttgtttatcttatctttcttatcgattggtttaaggcagatgattttaagcattattgctggggcttttttactgaaaacgaccgctatcagtgaatggacagccaccctgaccaagctaaaagcacccaagggacttacgattggagtggcagtcttgacccggtttatcatcaccgtcatccatgactttaaccggatccggcaagccctcttggtgcgggggattgacttttcacccaagcgggtcctaacccacccggtcaatgcctttgaataccttattattcccttgttaatgaatacttcttttactgcccgtgacttgaccattgctgccttgactaagggcttggatagtaaggcgcaacagaccagctaccggacctataccttgtctggtattgactatagctactggcttgccctggccgtggtaacgattggagggatactagcatgacctatttaaggatagaagctggccgtttttcctaccaggggtcaaaagagactcaaattgagatagaggacctgagtctcaaccaaggggagaccttggtggtttgtggcaattcggggtcaggcaagtcaaccttgaccaacctattaaacgggatcagccctgaatatattgaaggtcaggtccaaggtaaatttgaactggcccacctgcaagctggcaagaatggcttagatgattatgtagggattgtgggcagtgtttttcaaaacccgagaactcagcactttaccctcaataccactgatgaagttgtccttccttgtgaaaatattggactggaccaggccagtatccaaaagcgtctagactgggtggttgacctaatggggattgacaacttgctggaccggcccatctttgacttgtcaggaggggagaagcagttaattgccctggcttcgaccttgatcttacacccccaagtcctaattttagatgaggtttccagtaacttagaccaggctgccattgaccgaatcaaggggattgtggggaccttgcagtgccaagggatgactttgcttatcatagaccaccgactagagtggactaggggcttggcagactattacctgaaattagccggcggaagagtcgaaaaagtctgggaccatgaagcttttcaggccatgactgaagatgacttggcccaaattggcttgcggaccaacaagtcaatcttaaggtctgacctccacttttccaaagatcctgtatttaaaccagtattggatttaaaccagctagcagttggctatgactttcccttgttagaagggatcaacttggctttttcttatggggaagtgacggctgtgatcggccccattggaataggcaagtcgaccctggctgatgtgatggtgggcctccgccaacctttgaaaggccagattaaatggaagcgggctaaccaagaccggaaaagtttactggcgaagagttttattgttatgcaggatgtcaactaccagctcttccaccacaccgtttggcatgagttggtggtgggcaccaagtgggaagaggcagatccacaagatgaggacaacttacctaaccggctcttagatcgtctggacatcaagggcttgaagaaccgccaccccatgaccttatcaggtggggaaaaacagcgggtcctcattgcttcggccattgtctcaggcaaggaaatcttgatttttgatgaacccaccagtggctttgactatgaccacatggtccgttttggtcaaatattgcaaaacttaaaagatgagcaagtagttatgctcgtctttacccatgactatgaactggccaagcactggtgtgaccgggtagtggacattgaagactaccgcactagcaaaaacctaaaacttaactattaaaagaaagagccagcagaaggatagttccctctgctggctctttagttaaagtctttttaaggccttgatccggttttgggtagaagggtgggtgctccaaatggaatcgccggtttttttgaaggggttgtaaaagtacatggcactcatagaagagtcggccacttcactgggatccatctgggagattttcatcagggcactggctagggcgtcagggtttcgggtcatttcagctgcactggcatctgccaggtattcccggttacgcgagacccacatttggatgagacggctgaataagtggccaaagatcaagatcaaaaaacccagtaaaaaaccgatgaaaacgactaaaatacccgagtcattatcccggtcccttgaccgggctggtcgcatcatgccaaattggcctgaccggaagagaaaatggcccactaggatgagaaagctccccaaggcaaaggtggttactttgagtctggagtcgtagttttggatatgggaaatttcatgggcgattaccccctcaatttccgcccggtttagccggcccaaaagtccagtagtgactgcaacactggcattttccggtttcataccgatggcaaaggcgttgggctgcttgtcttttacgacatacaccttaggctggggcaagttttgcatcatggctaactggctaacaatattgtagacttgctgttctttgatggaatcatacttgccctggtggatttgcttggccttggtcatctgcagcatggaagaaggggcagaatttacggccaaggcgatatacaagcctcccacaatcaagccaataaccattccggttaggaagttgccagcaaaaatatagccggccagggccataatgagcatgatcactaggatgaaaaagcccacaatcaagaaggtttttcgtttgtttgaacgaatttgctcgtacatttagccacctacttaaaaagatacattaggaacttcgcgtttagaatctggaatttccaggtaggtcatctcagtgaagttgaagaggccggcaataatattgtggggaactgattggatcttgttgttgtagttcatcacggaccggttgtaagcctgacgagagccagagatacggttttctgtattggttaattcctcttgtagggaaagaaagttttggttggccttcaagtcagggtaactttctgaaacggccagcaatcgactcaaggcattggacaagtcatctgaagcagcaagtttttccttattagtagctccttggggtaggttgattaagtgctgtctagccttggtaacttcttctagaacttccttctcgtggctagcatagcccttaacggtgttgactaggttgggaactaggtcattccgtctttccagttccacgtcaatctgggagaaaaattgccccgctgcattccgtaagcggaccaaactgttatacatgctaaataaaattgccaaaatgacaattaagataataagaccaataatccattccataactttacctcctaaggtcctttaaaaactgagactatctaatgggcagtctagtttttatggaccgataaactattgtctgttgattctaactaattttatcataaatcagcaatatttaatagccgtttgaaagggctgtggtacaataacagtaagtagaatttatgaagattgagtggttaaaatgaaagaaaatgtaaagaaggcttgggtcatttcccttgccatgctggctttggtcttgatgacctggttagttgaccggacccaggccgaagaagaggaggagtccattgaccaagtttatttaaatcaatatttaaaaacggacgagaccatccccacccttgatgaactggttgaagacttgggacaggatccgagtgtggaagcagtagaggctgagttcggtggcaaaacagctgccttatttgaccaagatctcttaccttttgaagcagccttaccaaagcttgaccagggtgaagacttgcaagccattgaacgctattattatgaccaagtcgtcaccggtatctctcccgtcaggccaagctatacgatagaagaagaaggtttccagcttgcccaccataagccccatgtttctttagagaatgaggccttgtttgtagaccaaactggctttaagcgggtcagcgactggcttaaggctggctatttccaagtttaccctaaaggtcaaggcattcttgttgtggaaggcctcgttcaggtgaccgaagacaagaacttggctgatgtgattaacttggtcaattccttacaggtcgacttagcgggccaagaagtcaagagctttcctagtttactggaagaggaagacttgcaagttgaggactggagcaatttagaccaggccgacaacttccgctaccaagaagcgggtttgtctagccaggactatctacaagcccaagaggaatttacttttttagagccagacttgtatggctacttggattctcctacttccaagcaagacctaaaagtaatggacaataccatcttaacctttaaaggctttttggctgatgtagacatggacagcttggaagaaagtcacttgtcgatgaacaaggcgtcatggggcctggaggaaactgaggagaggaccatagaggttacggttagggtttgcccccgaccgtttggataaaaaatgtaatggaggatgagtaaatgaccaagaaaaaatggattgtcgtggccatcgctgccatattgctagtggtttcgggtatgtcccgcctaggccttcatgatgatggtgctggggaaggctttttggaccaatataaccccgcccactacttatttgctagctcggaagcttatattgaggttttggagccgggtgactccgactcgggcatcttagtcctgcctgttcacggagtgataggagttgatggagaaggctacaaccacgaattgctgttaacagccatcgaatcggccaaaaccgaccccagtgtccaagcaattttactggatatcgatagtccaggcgggtctgtctaccacacccatgaactctatacagccttgatggaggttaaagaggaaagaaacctgcctatctatgcctctatgggttctgtggcagccagtgggggttactatttagccatggcagctgaccaggtctttgccagccccgaaagcttgacggggtctatcggggtcattatgtcccagctggacttgagtgaactgatggatgaatttggggtgaaagagaaggttatcaagtcaggggaaatgaaagacattatgtcacctagccgggagatgaccccagcggaagaagacttgctacaaagttatgttgatgagtcctttgatgcctttgtagcggttgtggaccaaggacgggataatttaaatgaggaggaaatccgtgacttagcggacggtcggatttatagcggacgtcaggctcaaagggaaggcttgatcgatgaacttggcttctttaagggatgccctagcccagctgagacaagaccaaggcctggaagaagcggaggtctactcttttgcccaagatgatccttttgacctgttcgggaattttcccttctttaaaaatgacgatctagacctcgtgtcccaactagaagaactcgaccaggctcaaggtctttccctcgactacctctggaagggagggctgtctaatggccagtaagttaagcctagacagggtcagccaggctatcaaagactttcgtttgcccaagctgtttttagctggtttttggatccggtttttagcctttcttttcgatgtcttagttatcaaggcaatccaagccatccttttgaacctaaccctctaccggctttttagtccggccatccaggacagtttttgggtaagcctggtggaactcgtgatttttgtcctttattttttcctaaccactttgttttttaagggtcaaacccccggcaaaatcctctttgaccttcgagtaatctctttgtcatcagaagaaaatgacttcaaagtttacttattccgggaattctttggcaaggtcttgttttactactttccttacattgcagttcttttagttttttcagagaagaaccagcacctgattgacttcttagtggatacgacggtcattagggagtcccggctggaagaagtgaaccagtatttgtctcaaggtggaaatgaccaggcaggcgaagaatcgacacctgtaaccgactaagtttgctaggtcaagcttctactccatctgggttctttcaattgttttgacccgaatattggttttataatggaaagtagagtttgactcgttgacaagacgaaagataaatggatagatgaaaggtgatcatgtggctatttttacaggtacgctcttttcggaatatttagataaaaaggtgaaatttcgggctattgtcccaacaccgggtccaagcaaggaagctgatgtggagaccaaggctcctttaaagaccctttaccttttgcacggttggaatggaaattatgaagactggacttactattctgacatcttgatgcttgcagaacaaaatagcctagcggtcattatgccggacggggagaacagtttttactccgaccatattactggggcccagtacgggaagttttaccaaaaagagttggtcgaaaagacccgcttcctctttcctttgtcagacaagagggaagatacctttgttgccggtctttccatgggtggttatggggccttgcggatcggtttaacttgtcctgagacctttggcaaaattggggccctgtcgagtcccatcttctatgagggcctatacagccaggtggaaactgaagagattggcggcttgattgtagacaccttactcagtttgttcaagaaaaacccgaatggcgacttccaccccgacaatgacatctataagctagtggaaaaggctaatccaatgccagacttgtatttggcttgtggccagtcggatgaattaatcaaactcaatgaagacttccaccaatggttgactgctcgggggattgcccaccactatgtaaccgggccaggagagcacttgtggccctactggaatgaacaattacccttacttttggattggcttttagataaaaactaaacattcaaaggaggattataatggattttaaagaagaacaaggacaaattgtaacggaagtagacggcaaggtcgttggctctattaagttccgtgaccaaggcgaccaggttttggaagcttattccacctttgtggacgattcacagcggggccaaggtttagcccgtcagctagtcgaccaattagtagcaaaagcagaaaaagaaggcaaaaaaattaaaccatcttgttcctatgttgaaagtctctttcagaaagaaaaagagacatacggccatattgaagcagaataactagctttgcagtttataggccagcaggcactcttggagatgcttgctggcctttgctttacctttgaaagatttcaccctatgagtcatgttaatatgaccattcattcattataatatcatttattttaagttatgctttctattttatgaaaatattgatataattataatgaatttattatagatttaggaatggaggaggaaagggtgtttcaaagaatgaagaagaaacagtttacccctgttgatctgattatcttacacttggccatcagcctggtgtatatcttttttgcctggctattcacaaaagccagccttatatggcccatctttatcctggtcttggctagccaaaccctgggtagtttggtagcctattacttcatgaaccaaaaaagttatgatgctgttgcttttgatcgctttttatcaatccttgtagtctctagcctgattgccctcgtcgttggggttggcttttcttttttattgttctagcagggtagtttcatataagcaaaaaggacctctcctcaaatgggagaggtcctttttcaggactgggctactaggattcgaacctaggaatgacggtaccaaaaaccgttgccttaccgcttggctatagcccaataataagtggagggagaaggatttgaacctacgaacccgaaggaacggatttacagtccgctgcgtttggccacttcgctatccctccatgaaagtgacccctacgggattcgaacccgtgataccgccgtgaaagggcgatgtcttaaccacttgaccaaggggccttatttttttcgaacacaaatagtattgtataatcttatttacaaaaagtcaacaagaaatttatctttcctatataaagaggtcctcgatcaagctaaactttaactcagagagtaagttaattgctttacttatctaggataggccttatccgcaaatttgtcaaatacaagcttaatatttatcctagcttcaattagtgatataatcaggtcatatgttaaatctagctgtaatggaggtgctatatgccaatcgatatatccttagactcgattttatcttggtcgaccctctctagtattgtcgacattatcattgtttcttttgttgtctaccagttgattaaaattattcgggggacccggattaatgaactactcaacggtattttaatcatcttagtggttaaagtggtgtcttccgttttaaacttggaaacaactgaatatattattgactttattatccaatggtcagccttggccttaataatcatcttccagcctgaactcagaaggggcttggagcacctgggccgggggtcagtctttgctaaaaaaagacggtccaatccaagtgaaaaaatgattgatgcccttgcttctgccatctcctatatgagtaagagacggatcggtgccttaatttccattgaaggggaaacagcccttgatgaatatattgataccggaacagatgttaacggtgatatctcaagggaattattaattaacatctttattcccaacacccctctccacgatggggccgtgattatcaaggattttaagatagcttcagcagctagttacctacccttgtctgagagtccagccatccctaaaaaatttgggacccggcaccgggcagctattggtttgtccgagcaatcagatgccatcaccttgattgtttctgaagagacgggtgagattagtatttcacataatggtaacattttaaatggtatcagcagtgaggaaatggtggattacttaaacaaacatttggtgaatgaagaagataaccaagaaggcttctttaacaacttacttgacagggtcaaaaaaggagtgtccggtgaatgaaattttcctttgataatcccttagtgatgaagattttatccgttattgttgccattggaatgttcctctttgtatcgagtgaaaacaaccaaatggaccccgatgctcctgcgtctacccattccgtaacggaggtcctcactaatatgacggtgaccacggatgtcgataatgaagaatactatgtttccggggtgccagagtcagtttctattcgcttagacggccctcaaccaattatcgcccaaactgttattacccaaaattttaccattaaaacccctaacttaaaccggctaggacccggggaacacttggttgagttagaagtagagggtctgtcttctgaaattaattataatatcagccctagtgaagccagaatccaaattcaagagcgagaaaccaaagattttgatgtatctgtcgattttcaggaagaagactttatagcagaaggttatgaagtgaccaatattgaccaatcacatgattatgtcaccatttctggcgccaaaaacaccattgacgaaattgatgaagtcaaggccttggtccaaccagaatcaggcgatattaccagcgatgtgaccctaccaggtaatgtggttgttttaaataaggctggcgaacccctcaatgtcagtattgaaccgtctcaaatcgaagtttcgatccaggtagacagccaggaggttgaactgccgattgaattagtggagaccggtcaaatgtccagtgactatgaatatgagctggaacttgctgaggaccaggctgataccataaccgttaaaggtgattatgataaggtcagtgaacttgatgaattccaagtacccgttgacctatctggtgtaaccaagtcaaccaacagacaagtgccaattattttacccgacggcatctatgaagctgacttggaccaggttactgtccaggtgaccgtaacggacctgaatgaagaagaaaatggaggagatgaaggataatggggaaatattttggaacagatggtgtaagaggcatagccaaccaggaattgacgccagagttagcttttaagttaggacggttcggagctattgtcttgtcccgccatgttgaagaaggccagccacaagttttagtcggaagggataccagaatcagttgccgtatgctagaatatgctctcgtttctggccttttgtcagctggagcagaagttttgcgactaggagtgatcactacgcctggtgtgtcatttttgacccggtcccagaatgctgcagctggtattatgatctcggcttcccacaacccagtcgaagacaatgggatcaagttttttggtccggacggctttaaattatccgaccaacaagaagcggaaatcgaaagcttgttggatagcggagaagacgactttcctcggcctgctgcccaaggtttagggacttctgaagagtttaatgaaggcagtctaaaatatacccaattcctatcccaaaccatttccggcgacttgtctggcttaaaaattgtcttggatggggccaatggggctgctagtcccttgattaaccgactctttgctgatttagacacggaatttgacgtcattggggcttcacccgacggcttgaatattaacgatggctatggctctacccacccagaaaacctggcccaagaggttgttgaaaaggaagcccaagtaggattagcctttgatggcgatggcgaccggctcattgcggtggatgaaaaagggaatattgtcgacggcgataaaattctctttatctgtggtcgttacctagctgaccaaggccggctgaagcaaaatactattgtgaccactgttatgagtaacctgggcttttacaaggctgcagagaaatatgatatcgattcagtccaaactaaggtaggggaccgctttgtagttgaagaaatgagagacaaaggctacaaccttggaggtgaacagtccggccatattatcttcttagaccaccatacaactggagatggtctcttgacggctatccagcttcttgatgtgatgaaacaaactggcaagaaattatcagacctggctagtgatgtggaaaattacccccaaaaattagtcaatgtttcagtgaccaacaaggaagaagccctcaacaaccagaaaattcaagatgtgattgctgaagttgaagcagaattagccagtgaaggccgagttttagtccgaccaagtgggactgaacccttgatccgggttatggtagaaggcccgagtgatgaagcggtggaccactattgccagaaaatcgtggctgtcgtgaaagaagaagtcggcttagcctaatagtgctagcttttaaggtcctagctagaagagagagtgacctacctaggttaattccccatcaaggccggctgggtttaggaggaaagactcatgtttaagacgaaagatttgctgttcacgagctctgatattaaaagggaagccaaggcacagttagctggacgctggccctcaattatattcatgtttgtcgtcccaatgtttgtcatgccagtcctaaccctttggctacggatcttacttgaagagccttttgcctaccccatttgggggacttactggacctggttgcttgacttggtctttatcttcttaaacctgttaaactaccacctccaatatggaccagctcttagcttggttcgggtgattcgctggccacaagataggattgaacctttgtctgacttattctatttattccgggagggcaggtttggcccctaccttattctgggaatagtaaagagtatctttatcttcttgtggtccctcttgtttattatcccgggcatcattaaacaactggcctattcccaagctgaatatatcaaaaatgactaccgggctcgaggctggcacctgaccacgaccgaaactattacccttagccggcagatgatggatggccacaagatggatttgtttgccctttatcttagttttatcggttggtttattttggtcgccttaacctttggacttctgtcattttatgtcattccctacctgcaaatgtcattagcagttttttaccaaaatatatctaaagatttttttgctgaagtagacgaaaaaataaagcaagaagaattagacttttaaacatagatgaagccatgaaaaaggccactaaagattaagctgtaatctttagtggccttgcttataataagcgaaataatattaacgacgacggttttgggtgagtaagaagacccggagtatatttaagaaggtggtaatggttgcagcaacataggtcaaagctgctgcccggagaacttttcgagcttggctgagttcttcttcattgagaagagcggacccttctagcaccttcatagcccgtctagaagcattaaattcaacgggtagggtgaccaattggaagaaaagagccaaggagaagagcataatacctagcatgattaaaaaattcccactttcttggccgatcaagagaccaaaaaggataaccggccaagccaaggtcgatccaaagttggttacaggcacgaggaggtggcgtaagcgaagggggaagtagccttccttgtcttggatggcgtggcctgtttcatgggctgcgaccccaattgctgcaaccgagtctgaatttttggttgcttcagacaaacggagagttttctcattagcactgtagtggtcggttaattcccctcggatgccttctaagcgaatattggataggcccttggaatctagaatttgccggcagacttcggcagcggtttggccattgctagccttgacatcactaaatttggaataggtcgactgcatgtaaacggaggcagccccagagatagcgatcccaatgataactaaataaaaataagggtcaaaaaatattggcaatcctatcagcgttcctttctatggtcgtctcttataatgaattcattatatcaaagactgatcaaataaaaagggagaaagggctaataagttttgacgatattatgaattttatgcctggctgaattatgttagtataggggtagtttgatttcggcgaaaatttgacaagttaaggagatagtttgatgaccatttcgcaaaccattattgattttacccacaagtgcctgcagcagggggaccttttaggacttgacctgacctatgtccaaaaccaattgctgagaatctttcatttgaaagaattggaccaagtcgatcccagtgccaacttggcccagctagaccacctagacctcttggaccaactcctagaccatgcagtggacttagacttgattgaagacaatagttcaaacagggatgtcctgggagctgagattatggacttagtgacccccttgccttctcaagtcaatgccaagttttgggacttacaccggctaagccccaagctcgctaccgattatttttaccaaacaagcttgcaaaacaactacattaaaagccgggagatcgcccaaaatatctactttagccaccagactgactttggggatttggagttgaccattaatctgtccaagccagaaaagaccagcaaggagattgaagaggctaaaaacaatcccagtgactacccggtcaacctcttaagttaccaaaatgaaggctaccggggtcatgtgggccacccgggccggtctaaccatcgtttgatccggttaactttagataatggtgagcaatggggcttccagtactcgccttatgcttactacaatgaacattctatcttcttatccatggcccaccgccctatgaaagtgggcaagcaaacagtggtcaatttactcaatatcttagaagaatttccccactattttgtggggtctaatgccggccttcccattgtaggcgggtctatcttggcccatgaccactaccaggctggccgccaccaatttgccttagacactgccccttctatctacgactttacccttaagggggtccaggccagtattgtaaactggcccatgtctgtgatccgcctcaaagacccggaccgaaacaaattaacccaggcggcccaagtcgtctttcaggagtgggagagttacagcaacgaagacttatccatccaagcttttacaggggagaccccccataatgctattacccctttgacgcgtaaagatgggactgactttgtggttgacttggtcctccgcaacaaccggacagataagacttaccctgacggtattttccacccccacccagaggtccagcatatcaaacaggaaaacatcggcttaattgaggtcctaggtctagccgtcctccctccacgtttgaaaggggagttacaggaagtgcgggactacttactgggtcaaactggtcaagtagccaccatccaccaggcttgggctgagtccctaaaagaaaaatacgggatcctcagtccagaagaggtagacggggttgtacaggctgaagtaggggagaaattcctccaagtcttaaaagatgctggtgtctttaagttggaccaggcaggacaggctgcctttaaggctttcgccgacgacctggcccagcatgaatgaagaagtcaagccaaaataaaaaggatgaaggtgtcattatgaaagttatggccgttgatacatcaaacaaggccatggccatggccctagctgaagacgacaagcttttggcagtcaaaaaaatcaatattaaacgcaaccacagcatccaagttatgccaagtatcgctaacttgctagaagagaccggctggcaggctaaagacctcgaccggattgctgtagccaaggggccaggctcttataccggcctccggattgctggcaccctggccaagaccctggcctggacactgggaattgaccttgtggcctactctagcttagaggccttggccttgaacttggctctgattcggcaggtttatatctgccccctctttgatgctagacgggaaaatatctatactggcctttaccgttttgacccggcaggccagctggaaaatgtcatcgaagaccagcatctagctagtcaggactgggcgagaaggctttcggacttggatgagccagtttactttgttggagaagatgtgttgacttttgctcccttgtttaaagaaaaattagggcctcattttatctaccaaagaggggtcagtcagctcccaaatgttgaagccatggccttacaggctcagagccagcctcttcaagatgtccaccactttataccggaatacttaaaattggctgaagcagaagaaaactggctgaaagataatcctgatgcagacgggagcacttacgttgaaaaattggattgaccagctccagtcttggtggaccaatatagtgggtcaggtgtctctaagagattcaagtctccccctcatacaggaaagttacacgagccaggggaggagctaccaggtaaaagtgggccaaaaagctgacgccaagtccctggtcaatttgcaagaaactgcttacagctctaatgagatctggcccaagtcccttctggaaagggaaatgtccaccaagtccaattccctttacttactcctactctaccaaaactacccggttgcctttattggggcctggattaagggagacaactgccacgtctccaacttagtcgtcagacccggctatcaaagacaaggcctgggccagtttttgctccaccaggtagagcaaattgccttaaaccaaaagtgtcgctactatagtttagaagttagaaagtccaaccacaaggcccaaaaactctaccagaaaatgggctttgaaactgtcggcgtcaaaaaagaatactactccaataaccgagaagatggcttggccatggtcaagcaattaatattaaaagactaggaaggaagaagacggtggccgaccagaccgaaaagaaagagactcagctaggcccaggcctagcatccaagactactcctttcatccgccttttaaaggctcaggaagacttgtcccaagaactccaccaaatcagcctatctgcctttgcccagcaaccaccttggcaggaggcccagcttaacagtatcctccagtcagaccatgtccttacccttctggttgaagaaaagaaggaggtcttagcctttatgatccttggcttggctggagaccaggctgagatctatcaaattgccgtggccaaaccccaccagcgccggggcctggccagcctgcttatggaagactgcttgcgtcatctttgggctaatggggtttcaaagctttttttggaagtccgggcttccaaccgaccagctcagcttttctataaaagacaggggtttaccctgcaaggttaccgtaaaaattactaccataatcctaaagaagatgccttggtcttagccttaaacttaaatggaaagagagatggaaatgttcattcttgcaattgaaagctcctgcgatgaaaccagtgcggctgttatccaagatggccggattgttaaatccaatatcgtggcttctcaaattaaaagtcacgagcgctttggtggggttgtaccggaaattgcttcccgccaccatgtggaatttatcaccctgattattgaggaagccatgaaggaggcagaagttgactttaacgacctgtcagccgtagccgtcacccaggggccaggtttggttggcgctcttttgatcggcattagcgctgcaaaagccatagccttagcccatgacctccctctaattcctgttaaccatctagccggccatatttatgctagtaacctggttgagtccatgaccttccccctcctcgccctagttgttagtgggggccatactgagttggtttatatggcagaagatggtcaatatgaggtagtcggtgaaacacgggatgatgcagcaggggaggcctatgacaaggttggccgggtcctagacttgccttacccggccggcaaggtcattgaccagatggctgaccaaggccaagacaccttccacttcccccgggctatgctccaggaagataattatgactttagtttttctggactcaaatcggcctttatcaacacagtccacaatgccaagcaaaaggggcaatccttagatgccaatgacctggcagccagtttccaggcagcggtcgtagaaacattggtagagaaaactatccgggcagctaaagactaccaagtcaggcaagtgattttggcaggtggtgtggcagccaatagtggccttcgaacccatttaaaaaaacgactagaagctgaaatgccgcaactggacctccttattcccccaatctccctttgcggggacaatgcagccatgatcggagcagctgggaccatagcttaccggaaaggagactttggtcagctcgacctcaatgccaagcctggcctgatgctgtagataaaaacccctagtaaattggtttgttaggaaacaagccaactactaggggtcttgtggttagggtgaaccattatccgttagtggaccattttaaaacatagattattattcaaaactggcttcagttgacgaatcttagcgaaattctcaaacaaggactgttatttgagaatcccggcacttttttctcaaacaacaattgttatatgagaattttaaaagctcgcttgtttaggctaggtctaaaaactagcaaggttggattcattaaatacttatcatagcagtaaaaaggaccaggttagactggtcctttttatgaaacttaatggcctggggcgaagtggacttggttgtcttttaaggagttaatccggcagatggagtagacatcaataccttcagactcaaggttttgccggccatcttggaaggacttttcgacacagatcccaactccagctacactagctccagcttgccgaaccaagtcaaccagccctaaggaggcttgtccccgggctaggaaatcgtcgatgattaaaaccttgtcctcagcttgcaagtattccttagatacaatgactcggctggttttgtccttggtaaaactgtggacctgtgtttcgtaatgggcttggttttttaaggttgacggttcggtttttttggcaaagagcatggggacgtcaaattcaatggctgtcataatagcgggagcaatcccggatgcttctatggtaaaaaccttggtgaccccttcattcttaaagtggtcgtaaaattctctgacaattgtctttcatgactttggggtcaatttggtggtttaaaaaggaatcgatctttaatacagtttcatctaagacaatcccttcttggataatccggtcttttaacaagcccatcccatcactcctctagtttttaagaccattatacgaataaaagaaggagaattcaatacaatgttcggctaaagaccaatctttattcagcctttcacgattttttagtcatccaaatcgagcaagtcttcctggatttcttcccattcttccattaagcgaacctgttcttggtctaggtcttggtgggtctggcttaattcagctaatttgtcaggggcttggtagagatcaggcttttccaagtcttgggccaggtctgctagatcctggtcgatttcttccagtctggcttcaattttttccgcccggcgatttaatcggcggctttctttttgtctttctttcaagtctttgcggtccaggctgtcttgactttgctcttgcccttgttcaggggcttgtttatcttgttcagccttagtctgggctgcttcaatggcttggagttcttctttcttctggacataatagtcgtagtcgcctaggtatcggtcaataccacctgggtggatttcgatgacctggctggccaagcggttgataaagtaacgatcgtgggagacaaagatcaaggttccctgatagtcgattaaggcattttctaatacttccttggaatcgatgtctaagtggttggtaggttcgtctaagaggaggaagttgtttttttctaatgataatttggccagggcgacccgggctttttccccaccactgagggaatgaatggttttgtcgaccgcttcgcctgtaaagaggaagctggccagtagggttcggataaccacttcgtcaaggtctggctgtgcgtcccagacctcatctaaaatggacttattgccagttagattggcctgttcctggtcgtagtagcctaggtctaccttggtcccataccgaatgtcacccgccaaggctggattaacaccggctaagttcttgataagggtagacttgccaatgccgttaggtccgaccaaggcgatggcatctcccttgcggatgtctaagttaatatcctcggctaagacttgatcgccatacccaatggccagatccttagtctggaggacaatgtcaccggaagttcggtcagtttcaaaggagaagtaggcagactggtcatcctttttgggtttttggactgtttccatcttttctaactgcttacgtctagcctgggcccgcttggtggtggaggctcggacaatatttttttggataaagtcttccatttccgatatttttttctgctgcttgtcatattccttggcctgctgcttgatctgagccgattttaagtctaaataattggaatagttaccagggaaatgggtgacctggcccaaagccacttcgtaggtctcattgatcacccggtctaaaaagtaccggtcgtgggagacgattaaaagagccccccggtagttcttgagatagccttccaaccaggctaaggtttctatatccaggtggttggtgggctcgtctaaaataagcaagtccttgttttccaaaaggagcttagccagggctaaccgggtcttttgacctccagaaaggtgattaatcggggtgtcgtagtctgtttcgtaaaattggaagccatgtaagactgtccggatttcactttcataaccgtagccattttgctttaaaaatctggtttgcatcttatcatactgggccatcaggtcttggtagtctgagctagtctcttgaacttggctgattttttcttctaattggtggaggtctgtttccaggtcaatcaaccaagagaagacagactccatttcttctaggatagtccggtcagagtctaggccagtatgctggtctaaatagccaatggacaagtccttttgccaagaaacttggccagcgtcaggatcttcatggccagccaggatgtggaggagggtagacttgcccgccccattcctgccgactaggccaatccgagccccatcttggacctgtaagttgacctggtcaaagagggtttcacctgcaaaatccctagccactttttgtgcttggagtagtatcatatacattcttcctttaaaaatagtcaccttagtttaacataaatctttgcctcttctgaatgacatactggtgcttgtgacttatatctttttattataagaaaaaatatgttcactaaaaactttcattaataggttgaacttgttatactattcattgattgtgaattgattaattttgcaaaggggaccatattatggtaaaacaaagacagattccaaaggcgacagcaaggcggttgccactttactaccgttactttacctatctttatgaaacaggcattaagcggatttcttcagcccaattgagcgagtctatgaaggttgatagtgcaactattcgaagagacttctcttactttggggccttgggtaagcggggttacggctacgatgttgaaaacttgatgaacttctttaaagaacaattgagtcaagaggagttaaccaatattgccttggttggagtggggaacctgggccaggccttgcttaactataacttccggaaagacaatagcatgcggatatcagccggctttgatgtcaatcctggcttgatcgataccatcttagaaggcgtcccaatctatgatgtcaaggatctggtggcccaagtctctgaccaaaaaatcaatgtggccatcctagctgtccccagcgatcatgcccaagacatgactgataagttagtggaagctggagtgaaaggcatcctcaactttacccctctaagggtaacagtcccacctggagtccgagtccataatgttgacttggccaacgaactacaggccttgatctactttatcagccattataccgacactgaccaagaagccagcatggatgaagaataaaaaaccgactaattacttctcttgtggggtaattagtcggtctttttacttaccgcccttgcgtatattccaatagaccataaagtgtctggtggcttggacaaagtcgtagctggctatcaaagcagttaggagggtaagaagggagaagccagattctttaagggactggaccaaaagaaagaagaaaaggaggaagaaaagaaagttaagaccggcattcatcaatagggtttgcttcatttttagccctccttagaccagcaagttcaagatggtagctaaaatgttcagccccatatgggcgatgatgggaccccaaatgttttgggttttgtagtagacatagctaaagataaggcccatgacagaataagttaaaatcatcccgtcaaagtggataaaggcgaagaccaaggaagagatgacggcagccccaatccagccaatcttgtctactaagaggccgttaatcgcctttctaaagaccaattcctccaagatgggggcggagatgatgggaaggaggacgaagagggggttggccaggatggttgccataatggatgtggtattggccgagacggtgggttggccaaagagggtgatctctagcatggttagggccacttgagacaggtaggctaaagctgttccggttaggccccaagtgaggatttccttgccttttgtttgtcctctttcaaagggataaaccaggttgaaatgataattaatccaaagggcaaagaaggcccctgccaggttgatgaccacattggcattgataaagtagctgggtggttggctttggaaaaggaagacggctacaatcgataagacttggacggcaataaaggtcagcataatgctgacagccgggccaatctgggaaggcttttgttttttaggacgcaaagttagacctactttctttataagagctatcatttctattcttcattataacttatcataaaagctagaccatgtcataagttggagaaaattcataaaatcttcaagtcaatcacttgaaagctaggcggaaattttttatactataaatgaacttagcactcgggtcacttgactgctaagtcatcaaattaggaagatttttggaggcgaattgaatgcttaaacctttaagtaaccgtgtcgttttagaagttgctgaaaaagaggaaacaactgcgagcggttttgtattgccagaatcagccaaagactcaccccagactggacgcgttgttgcggtaggcaagggcgtcttattacccgatggcagccggtctgaagttgaagtagctgaaggcgaccaagttatctttgaaaaacacgctggatccgaagtgaaatacgatggcaatgaatacctagtggtaaaagatacagatattatcgctgttgttgagtaagtgagactagcaggtaaatctttttttgaggtgatataaattatggcaaaagaaattaaatattctgaagatgcacgcaatgcgattttagatggtgttgacaaattagcgaatacagtcaaagtaaccctgggccccaaaggtcgtaacgttattttagatcaatcatacggtgcaccaaccattaccaacgacggggtaaccattgccaaagaaattgaattagaagacaagtttgaaaacatgggtgcccaattagtcgtagaagtcgctagcaaaaccaatgacattgctggggacgggactacaactgcaaccgtcttagcccaagccattgtcaacgaaggcttgaaaaacgtgactgcaggtgccaacccagttggtatccgccgcgggattgaagaagcaaccaaaaaagctgtccaagccttgaagtctatttcaactgatgtctctgactctgaatccattgcccaaattgcttctatttcttctggtgacaaggaagttggtcagttgattgctcaagcaatggaaaaagtcggcagtgatggggtcattaccattgaagaatcacgtgggattgaaaccgaactggatgttgtcgaagggatgcagtttgaacgtggttacctctcccaatacatggtaaccgacaatgaaaaaatggaagccaacttggacaacccttacattttaattaccgacaagaaaatttctaatgttcaagacatcctcccattattggaaaacattatgcaacaaaaccggcctctcttgattattgccgacgatattgacggggaagctttaccaaccctggttttgaacaaaattagagggaccttggacgttactgcggtgaaagcacctggctttggtgaccgtcgtaaaggcatgctagaagatattgccatcttgactggtggccaagtgattaccgaagacttgggcttgaacttgtctgatgcgacaatcgatgacctgggtgttgccagcaaggctattgtgaccaaggatgacaccaccattgtagaaggtgctggcgaaagcagccaagttgaagaccgcgtagccatgctccgtaaacaggcagaagacagcaattcagactttgaccgtgaaaaattacaagaaagaattgctaaactagctggcggtgtggctgttattaaagttggtgcccctactgaaactgaaatgaaagagcgtaaactcagaattgaagatgccttgaacgcttcccgagcagctgtagctgaaggcatcgtagctggtgggggaacagcttatatcaacatcctcaaagaagtcaaaaaacttgaagaagagtctgatggcgacctagctaccggtgttagtatcgtcgtccgtgcccttgaagctcctgtccgtcaaatcgcagagaatgctggtattgatggcagtgtgattgttgaacgcttgaaagctgtcgaagaaggtgttggcttcaatgcggcaagtggtgaaatggtcgacatggttgaagaaggcattatcgacccaactcgcgtaacccggtctgccctccaaaatgcagcttccatcgcagccctcctcctcacctctgaagcagcagtcgctgaaattccgtcaggcgatgatgataaccaaggcggaggcatgaaccctggcatgggtggcatgatgtaagacgagcgtaaaaatgacacaagcaaaaagagccaagctgaactcagttctaactaaactgagttgcttggcttttttgcttgctttgctgaagattaaggcatggggtggccaaaaaattgggtcagataaaggataccctcatcataggctacgcctactcccatctgggtgtagctgggattgatgatgttttcgtagtggccttggctatccaaccagccttggaagatgtaccgggccatatgggcatcgtcgacatggtaggtcgccatggccagattttctccgatgacttggtattggtaattaggtggggcctcactgtcttggaggacggtaaagaagtcttgaccgtccgggcgggtatgggagaaggaggtaactgtctcttgggctcttatgtcacctgccagttctaagtcgctattctggctgagaggggggaggccttggtcagcccgggtttggttggtgaggtctaaaatttgctctcgcagcaattggtcgtctatgtccagactggttaaatcttgcccgcctgcctggtggcttacttcttgacggctggcttggtccaactccggctcctggtcattttgatcccagaagtcggaggtaatgggcaggtagtccatcacccaatctaagccgtcgccaataggggtcccgctagcgacttgggaaacagctagccaatagcctaatatgatgaaaaaaatacttttcaataaagagctgatcaaacgcatagcccttcctcctttatgcccttatattgtagcagattagataggaatttgttactgtctttaactctttaccccttaaatttttaacttagcagcagtaatctttacataaactatacttttacttgctatactaaaatcctaagtctattgatgaagggagttggcaaaatgggaagcttaatccagcttgaccaggtttgcttagaactcaaggacaagattattttacaagatatttcttttgccatcagccaaggagactttgtcaccctctacgggccatcagggagtggcaaatctagcctgttaaaattagtcgccagcctcatcaaacccacgagtgggaccatttattttaaaggccaggatatatttgcccaagacatcttagattaccggaaaaaggtgtcttatttttttcagaatcccgtcttgtttggccaaaccgtaagagataatctcagctttccctatcaaatccgccatttaaattttgaccaggaccgggctcttgacttgcttggccgggtcaagctcgaccagtctattttagacaagtcaattcaagatatttctggtggggaaaaacagagggtggctctggtccgcaacctcttatttccaccactggtcttgctcttggatgaaatcacctcttctttggaccgtgagaccagccagattatccaagacttgcttgaagacttattgactcaaggagcaaccatcttatcggtaagccacaaggaagaagatattaaccggtctagtcgcaaaattcagatcgctgatggaaggatggtcgattaaagcttggaaggaagtgtagaaattaataacttgtcgcttttactgtcgacaagtttactggtcgttgctattgtaatctcttacaaggaaagtttgggcctgtccaaggatattgtcatcgctggggtccgggcagtaatccagctttttatcattggttttgtcctggaatatatttttgctatcgaccagcttgtcttaacccttttgatgatcgcctttattatctttaatgcctcttacaacagccatcaaagaagcaaaggcatgtcaggttcgcttaaaatatccctgacagctatcgggttctccagcctagttagcctcttgctccttgtcgtgaccggggccattgacctagtccccacccaggtcgtcccgatcaccgggatgattgccaatggggctatggtggcggtggggctcactttccaatccttggaccagcagtttaaagaccaccagcaggaagttcaggaaatgttgaccctaggagccagtcctctccaagcatccaagtcgatgattgcccaggccattaagaccgggatcagcccaaccattgactcgactaaaacagtgggtctggttagcctgccggggatgatgtctggcctcatctttgctggggttagccccatcctagccatccgctaccaaattgtcatcatgtttatgctggtttcggcctccagcattgccggcatcatagccagctacatggccttccgcaattactttaatgacttccaccaggttactagctaaaagtagtccgataaagccataggaaaaagtcgtcagtgttacaaatgtgacaaagagatgttaagtttaatggaataatacaaagcaactaaggggaggtaacaaatgggccctccctctttttttatgccgaaaacgtgatagtatgatgaatgtgctaaaggaaatagaaaaaatactatttataaggagacattcaccatgaaattacggaataaattgatcgcaactggtgcagctgccttgctttcaagtgtctttgccaaccaagcagacgtagaggccgctacttggaccccaagaaccgtggaagaaatccacgctgacatccaagaagaaaaggccaaccaagaagaatctgaaccagttgaatacaccattaaagatggagacactctttggggaatttctgaagcgactggcatttcagttgacgccctaacccaagtcaacgacattgccaaccgccacttgattattactggtaacaccatttacttgagtgacgacaactcagtcctttctgttaaagacgaaaatgaccaattgaaaagttatgaggtaagcgaagaagttaaagaaaccgaaactccgcaagaagtcactgaaagagaagaagacaggcaagaacaagctgaagcacctgttcaagaagaccaaaatcaagaacaagctgaagctcaagcccaagaagctgaacaagctccagaacaagcccaagaagcagctcaagatcaggaagctaacgaccaagcaggccaagttgtcgctcaaccagcttctaaccaaggtcaagaccaagcttctgcaaacactggtagcttcatcggaaccttcaacgcaactgcttacgctataggtgacggtttaaccccaagcaccgttacagctaacggaactgacgtatccaacaccatctactctaacggccgtcgcattattgcagttgaccctaatgtcatcccacttaactcaactgtcattgttgaaatgcctaacggtagtcggttcactgcagtagcagctgacactggtggtgccatcaacggcaataccatcgacttattggtatctagcccagctgaagctcaaagctttggccgtcaaagtggcattaaaatttaccgagctaactaatatgtaaaagatgggacacaaaaactccaggctgaaaggcttggagtttttgttatcttctcttcttgaccttgttggtttaatagccccattgttctatagtaggagggaccatcatccacctcattattctcgaacaacttacgttattcgagaattatttgagctttttctcaaacaacttatgttattcgagaattatttgagtttttctcaaacaacttgcgttattcgagaatatttcaaaatttttctcaagtaacaattgttatacgagaattttcaaatcctgattgagtcagtacactttataagtgtctaccctaggggaaaccatgccggcctttctgtttaagaatgaccctggtgaaaccccaccaaggtcaaactatgtatcagtcgtttttcatggccattaattatataataatataataagctaaaatataattaataataactagcaatgtaaacgcataattgatataatttagtcaagaagccaagcgcttcacaaaataataaggagtggcagttatgaaaaaattaactcgcttaatgttaacttctatcttagctggatctttcttagtagcttgtaacaacaatgaagagccagctgaggaagaacctgcaacagaagaacccgcaactgaagaagaaacaactgaagaggatgcgactgtagaagaccctaccggtgaagaagcggtagaggaagaagaagcaggagacgaaaacgcaggttaaacctgccaatttatccataaacaaaaaaggctgggggctaaaagcccctagctctttttattagccttggtagattcgagggatgcgggggctgatccgggtgaggatttcatagtgggagctaacagcctggtcgccgatttcaaagagggaataggtatcttggctttcagggctgaaccaggtgacttcatccccaacttcaatatctgggacctggctgaggtctaccattaattggtccatgcaaacccggcccacaatcggcaatttttgaccttggtagaggaagtagcccttattggataaactgcggaagaccccgtcagcatagccaataaccagggtaccaattttcccatcctggtccatctgataggtccggttgtagccgatataacgctctttttctaagggtttgacatgggctagtttggtcttgacggtcatcaagggtttcaggtcaaccaaaccagccatatctgaggctggcggataaccgtaaaggcagattcccacccggaccatgtctaagtggtattccggaaagcggagggtagcagcagagttacaggcatgcttgatagcaaagtggtgaccctggtcttctaaagtttggaaaacagtttggaagtggtcaaattgctggcgggtaaagtcctcttcgtccatattatctgcatccgcaaagtgggtgtagatcccctcaaccaggcagtttcggtcttctagttcttctaaaactgcttgcccttggtcggcgttttggacgccgatccgggacatgccggaatccaccttcaagtggacgtaggctttggtgtttaatgcttgggctagacggttgatgactcgggcatggtctggtctaaaacaggtgattcggattttgttttgaatgactagctcgagttcctcttcattggtgaccggggtcaaaaccaagatcggtaggtcaatgccggcttgtcttaactcgatggcttcttgagccaaggcaacagccaagaagtccactccggtcgcttggagtcttttagccacttctacagccccgtgaccataggcattggccttgaccacgccacataatttactattttttgaaatatgtttggttaaggctttgacattgtcttctaaatgctttaaattaattattgcttgtgtatctctcataatgattcctcctaaacttattatagagtagacaggctgaaatctacaggcaagactttggtcggctaactagctggttataactaggcatgtttatagtcggtcaaagtagtggaaaaggagtatgatatgcagtatttaaaaaaatcaaaactatttgccatactggtggcggtcatcctagttggcttggctatcatggttttctctacggttgactttatattctacccgatcggtgccttgtttgaaagtctctttcctatctttctaattacaggctttatcttttatatctttttgcccgtctatgaattcctagataagaagatacataatgatgggatcactattcccctagtccttcttctcattattctcattctctattttcttatttcggcctttttacctgaaattatcaagcagatttccaatctcatttcgattacaccggggattgtcagtgacttggtggcttttattgaaagtttagtcgatgaatacaatatttctagccaagaagtctacaattaccttagcaacttagacctttctgtaacgaatatcttaactaatattttaaaccagttaacctctggctttgggaactttctgtcggtgaccatcaattccttggtcattatcgccactgttcccttggtcttgatctacctctttaaagaaaacgaaaaggtccctaagaatatcttgcaatttgtctcacccaagtacaagacacttgccttagatttattaaccgctttccacgaaaacgccaaaaaatacattgggggccgggtcttggtctgcgtgtttgtaggaatctcttcttatattatttacctcctacttggattgcccaatgccatgctctttggtctcttcagtgctgttgctgacttaatcccttacttcggtccctttatcggggcagccccagccttctttgtagccctatccatgtctccattgcgagctttggccttggtggtattaattaccatcctccagcaaatcgagtcctatgtcttcactccatttgttatgggcaacagcttggacctgcacccagtgacagtcgtggtcttggttatctttgccaaagacgcttttggtgtcttggggatggtcttgatcttaccagcttatgctattatcaagggctgtgccattgttttgatgaactacttgagggacaagaagggaattcaaatcaagtatgattaattgttgccagtaatcattaatggtataatagcgaaaaaaatacggaaaatttttattggtcgcaatcggaggctttaacagtaaatggattcaaattatttgtccagtatccttatattcttgttttttgtggtgctttcagcttatttctcctcgtctgaaactgcttttacctcagttagggaaaccaagctgaaaatccaggccaaaaatggagacaagcaggcagcccgcaccttgaaattgcaagagaatttcgatgatgttttatccaccatcttaattggcaataactttgccaatatcgctgcttcagctatcgcaacggtttttttcgttgacctttaccccagatatggggccaccatttctactattgtaaccaccatccttctcttgatcttggctgaaataaccccaaaattactggccaagatggttcccgaacccatcgccaagatgacttcacccgtcttaaacttcttactggtcctctttaaacccttgatttggttgctcggtcagtggcaaaagttggtaaaaataatcgtcccaatctctccttcagagtcccttagtgaagaagaactcctgtccatggtagatgaagcccgggtggacgggtcgattgagtcagaagagcataaattggtcaaggcagctattgaatttgatgatgtcgaagtctcttccatcctaacaccccgggttgacgtggtaggggtggatatagaagacagtgatgataccattgaagagacctttgaccaaaaccccttttctcgacttattgtttatgatgaatccgtggacagcgtggtgggagtccttcaccaaaaggactttaaccgctacttaagagccaagcagaggggggccttgaaagtccagtcggtggtcaacttagtgaccgaagtcctctatgtcccacctatgatcaagctttttgacctcctccgccttatgcaacgcaacaagaaccatatggctgttgtcgtcgatgagcatggggggatgaccggtattgccaccatggaagatgccctagaggagttggttggcgaaatttgggatgaaacggatgaagttgaaaatgagatagaggttcttgaggaagggtctaaaatccgggtcaaggggacctacccgatcgaaaaactcctagctagcctcaacttgcctgttttagatgactggttatccaataccgtctcaggttttatgatagagcaattggagcgggtgcccgagtccaatgactctttcatttatgagggttacgaatttttagtcttggatgcgcaaaagcggcgggtcaatgaagttttggttgaaaaaattgatcctgctgctgattcagatgaaccggatgattcagatgcagattgatgaaaatgaagtcttttagggttgaaaggccgaggtgagaagaaaggctagctagacctaagtctggctagcctttttcttttttagccgtgtttgattggtcaccaaacgcttactattgcaaagttaggtcataaagatgtaaaataaaaaacacgtgacttttgtgaaaaaaagatagaccaagcaggaggcagaaagaatgaccggaaataaatttaccagagaatttaccctacccccttatttaagtgaccgttaccgtaatattcctttaaccaccctgagctccattttagtatctgtcttaggccagcaaagtgaagaactcggtcaagaggcagaacttgaagcttatttcaaagagaaaaacctgtcttggataattctcaaatttgacatggacattgatcgccagccagatgctggtgaaaagctaagggtggagacctatgccacaggttacaacaaacttttttgctaccggcaaattgatgcttatgatgaacaaggggacctggttgtccagtctacggtcacctatgcctggttcgatatgaccaaacgcaaactggcccggttagacccagacatcatgaccctatacggggcagactacgaaaaaagaattcgccggatgaagacgcctgaatttgaccctgaccaggcttcagagggagaccattttgaagttacttattttgatattgatatcaataaccacgtgaactttactatttaccttaaatgggccatccagtccttgggggttgattttatgaaccgccaccgggttcaatctttgtccatcaagtatgacaaggaagttttagaaggggaagaggtcaccgttaaaaccagcttgagtccagaagaagacggacaagttcaaaccatctccaaagtagaaagtagccgggacaatgccactgttgtcctggactgggtccagcggcaaaatcaagactagctagactaggctgcaaaaataaagagctaaacaaatagacttgttcggtctatcctgctaagacttaatgttacaatggtaaaaaagccatcctgccaaaaactggtgggattggctttttttattccagtcttgttaagacttaaaaggcaataggtgcatttggaccaagtgggagacccaagaggtaccagatgatcaagaggatggtccaggtgattaagaaggtaatcgagtagatcaacatggttgaaattagggttccaatccccgagtccttgtcatagcgttgggtgaagacaatcaccatagcaaagtagttcatcagtggtgaaataatattggtggtagagtcggcaatccggtaggccatcaaggtcatctcaggggttaagtttaggttatagaacattggtgtgaagatgggggataggatagcccatttggctgaagctgaaccgatgaagaggttgataaaggcagccaccaagacaaaacctaagatgagggggataccagttagagaaatggattcaagaaagttagctccggcaacagcaataatggtccctaagttggtgtagttaaagtaattaatcagttgggccgcaaagaaagctaagacaatgtaagcccccatggagctcatggcttcagacatgcctgttacccagtctttggtatctttaatcttgttaatggttacaccgtaaacggtacctggtatggcaaagaggaagaagatagccaagagcaaaccagctgacatgaagttgttcaagttgactgcttcagcagtttcgtcaaaggattggaggattccactgaaagggaggttgaagtcaaacatgaggtaaaccatgacgattgcgtaaatgatcagagcaatcaaggcattgcgcaggcctcggtgttcaaggtcggtcaagggctcttggtctgggacaaactccccattgtattcacctaatttgggttccacaaacttgtctgtcacgatggcccccacgatggtcaaaacgaaagaggaagcaatgatgaagtaccagttagcagttacttgaatatcgtatgtaatattcgctgcatccaaggcttcttcagtaatcccaaccaagagggcatcagttggaccgggcaataagttggcagagaaaccagctgaaactccagcgaaggcagcagctaaaccggcaatggggtggcggccagctccggcaaaaataacagcacctagagggatgataacaacgtaaccgacatctgaggcaatgttagagatgaccccggcaaagaccacagcagctgacaagaggaagggagggacatcggagagcaagttcttcaaggttgaggaaatcagaccggtccattctgcaatcccgacccctaacatagccaccagtactgttcccagtggagcgaaggaagtgaagttttccacggcgctgttaaagatatagttaatcccatccacacttaggagggattcagcagccacggtcacttcttcaccagttgggtcggtatagtctagggcgagtccagataagtcagcaatacctgaagcaaggatgacgatagccgccaagatgataaaaataaaaacagggtgggggagcttgttcccgacccgctcaatccaggcgaagaaaccagaattttgctgctggttagcagtattttgatccattttgatcaaatcctttccaagaatgatagtctatttttttacagttgggaattagaaaaatgggttgtagcttttctcatggccaatacttgtagcctgaccatggcctgggtaaacagtaaagtcatcgtctaggctaaggagtttggtctggatactgtccagcaaggttgggccatcagcattaaaggaatcagtccggccgatactttccctgaagagggcgtcgccagcgataacttgtttgtcagattggaaaataaaggaaacagacccaggagagtggccgggagtgtggactactttaaagtcaaagggtcctatctctaactcaacttcctctgtaaacaagtggtcggcaggctggcaggtaaagggctgccccgtcatgctagaaaagtttaggtcagggtcaagtaggtagtccttttcgatttcatggatgctggccgggatatggtaatagtccctaacctggtccaaggctccaatatggtcaaagtgggcgtgggtcaggaggatgtgaagaggctttaagttcaggtcttcaattttatgaatgatccgctccccgtccgaacccgggtcaaccaccagggcctggccatctttttccagaatgtaacagttttcctggacaggcccggtgatgagtttgtgaattttcatgaaggtcactcccttattaaaaagtgattactaagtaataataagtatatagaaaagataagagtcagtcaatatttgcactttattcatttttaaatgcgcagtaataacaccccttcacttgccttacgagctttcgtgacttaaatcgattgtcagactagttttatgagctatgtccataatttaaatctagctgaaagtaaggaaggaccaataaggatattattgtaaatataatagttgaacttaaaaagaattgtatttcttgaatgttaggtgataaattgcatgaatgattataaatattttatataaaaaggtctattgcttacagggttattggctattaattaataatatagtataataacgatttgtatagaagcattgtattatattattaaaaaatagaggaggtttccttgtgagtaaggaaaacaaagagaagaaacttggactcttgccgcaattaatcgctgcgattgccttgggggctttggtaggtcagatgtcttttattccggactttatcttacaaataccggtgactttttcagacctgtttgggaacattctgaatttttttatccccttgatgatcgttggctttattgtgaaagggattgccgacttgtcagaaggggtaggtcgcctacttggggcgactgcaggtatttcctacttgtctaccttaattgcaggattggttgcctacctcatagccagttgggtttttcccttatttatccaaccaggccaggcaacagttgaagtcacaggtcaaggcttagatcccatttttatggtggagattccgcctatgtttgaggtgacctcggccattgtcttttcctttatgtttggcattaccatttcatggttaagaagcaaaaaaaattcctatggcatgtataacttttttgatgaatttaaccagtcggtcagtcttatccttgataaatttattgttccatttctccccttatttatctttggcaattttgttaacttgtcctacacaggaacttttggggcaatcttttcagtcttttggcgggtctttctcatcattatcacccttcattgggtcttcattattctttggtatattattgcgggaacctatgctggtaagaagcccatggatttaatcaagaaccaattaaccggttatattgcagctgttggtctccaatcttctgctgccgctattcctatcaacttggaaattgctcaaaagaatggggtttccaaggaaattcgtgattttgtcattcccttttgttcaacagcccacttgatggggagtatgatttccatcacttccagtgtaatggccgttctgatgctaaatgatatggccaatgactttactatcatggctcctttcatcatcaccttaggtattgttatggtagcagcccctggagccccagggggagccattatatcggccttgcccttcctgaccatggtagggattgacccttctggtagtctggcttcccttctggtttcccttcatatggcccaggacagctttggtacagcgacaaatatttcaggggacaatgcaatcgcggttttaattgataaatggtttaacaaaaataccaacagtaaccaagctagccaaggtaagtaaaaattttatctggcagctttcacactagacgaagcttttgctatattggtgcagatcaggcagttctaatccatcctcagccaagtcaggaattggtcaatcgccttctaaaacaaggctagaaagagatcttaagatcaaagacttatgtatagataaatattaaaagggctaagggtactgtcccttagctcttttcttactgactgtgcatgtgacccaaataaaactagacaagagaagttcctgataatataatagaataaatctaaaggataactcatttattggtcattaaaatggccttgcattcccggttggatcatgctattttataagcagaatataagaaagcgttttctttaatagtgatttcacaagaaaaaaggagggttcaagtatgatttatcttgtcttgccgacttaaacagttgtatacttagtccaatctttttgaaaactgaaggaggtttcctaatgagtcaggaaaaaaagaagaaaaaatttgggctcctgccccagttgattgtagctattatccttggtgccctggtcggtcaaatgacatttatcccagagattatcttgcaaatcccggtaaccttttccgatttgttcgggaatattttaagcttttttatccccttaatgattgttggttttattgttaaagggatagccgacctgtccgaaggggctggccggcttttaggggctactgctggtattgcttacctgtccactttaatagccgggcacggtcgcctatttagttgcgaattttgttttccctttatttattgaagtaggcacctttgtaggtgaagcagaaggggagggcttggctccgatttttacggtcgaaattccagccatgtttgaagtgacttctgctatcgtctttgcctttatgttcgggatcactatttcctggttgcgaactaacaaagagtcctatgccatgtacaattttttcgatgaatttaaccaatccgttatctttgtcctggaaagatttatcgtccccctcttgcctttctttatcttcgggaactttatcaacctatcttacgctggaacttttggcactatcttgtctgttttttggcgggtcttcttggtcatacttatcctgcactgggtctttatcatcctctggtttgtcttggccgggtcctatgctggcaagaacccatggactttaatcaaaaaccaattatccggctatattgcggctgttggactccaatcatcagcggctactatccctattaacttagaaatcgcaagaaaaaacggtgtctcacaaaaaattcgtgactttgttgtccccttctgtgcgaccgcccacctgatggggagtatgattaccattacctcctgtgtcatggctgttctcatgatgaacgacatgccttctaattatggcatcatcgggccttttatcatcaccttagggattgccatggttgcggcaccaggagctccaggcggggccatcatggcagccttacctttcttggggatggtggggatcgacccgtctggtgccctggcttctttactggtctccctctatattgcccaggatagctttggaacagccaccaatatttcaggcgacaacgccattgccgttctgattgacaagtggtttaacaaaaatataggcggaggcgacataaaccaagccagtgattaaagcctaaagaacattggccaaacttgtgtaaaagcttggattttgatccaaaacttgaaacgaatagaaaaaactcagccagacgataagatttaaccctagtggtgtggtaagatagaggaggaaacaggaatgaccaagcaatattttgacaaagaaatttttgcaacaattgagaaggagaggcaaagacaagaagacaatattgaattgattgcttctgaaaactttgtctctgaagaagttttacaggctcaagggtctattttgaccaacaagtacgcagaaggctaccctggcaaacgctattatgggggctgtgaatttgtcgatgtcatcgagcagttggccatagaccgggtcaaagacttgttcgaagctgattatgccaatgtccaaccccactccgggtcccaggccaataacgccgtcttccaagccctgctccagcctggggacacttacttgggtatggacttgagccacggggggcacttaacccacgggtctccggttaacttttctggcattttgtatcatgctgtccactacggagttaacaaggaaacagaactaattgactacgaccaagtccgccaactcgccatagaccaccagccaaagatgatcattgctggctactcggcctatccaagggagttggactttaagaagtttagagacattgctgacgaggttggtgcctatctgatggtggatatggcccactttgctggtttagtcgcagcaggcgtctatcctgaccctgttccttatgcggatgtcatcacctctactacccacaagaccttgcggggacctcggggaggcttaatcctagccaaggcaaaatatgctaaaaaattaaactcggctatttttcccggtagccagggcggtcccttggaacacgtgattgctgggaaggcagtggcctttttagaagctgcccagcctgcctttaaagactatgctaagcagattaaaaagaatgccaaagctatggcagaggtttttgcccaatcagacaaggcccgactgatctcgaatggaacggacaaccacttgctcctccttgatgtaacaggttttggccttaccggtaaagaggccgagaagcttttagaccaggccaaaattaccgttaataaaaacaccattccttttgaaacccggtcaccacaagtgacgtctggtatccgcttagggacaccggctgtgaccactcggggcttcaaagaagaagattgccagcaagttgcccgtttgattatccaagcattggaatcaaatgaccaagaagaggtcctcgaccaagttcgtcaaggtgtagccaacttaaccaaggctatcccactatacaaataagaaagaatgagttgatgaaagaaatacaagtaaaagaccaagaaggatcctataaactagcccagaccctagcccaatatgtcaagccggggatggtcttcttactagaaggggacttgggggccggcaagacaacttttaccaagggcttggcccaggccctccacattgaccggatgattaaaagtcccacctacacgattatccgagaataccaaggtggcgatctccctctctaccatatggacctctaccggctggacttggacatggccctagacctaggtttggaagaatattttgacggccctggtctttgtgtggtggagtggccttcccaggcaatggaggccatgcccagaaaacaccttaaaattactattaaggattactttgaccaagccggccaccggactttttacttgcaagctgagggagaagcctaccaagccctcctagaccaggttcatttagacgaatagaccagcagaaaagagctaagggaagaccttagctcttttgctgtttctgctcaatggggtgatagttttgacttagtggttaaagattaattttttcacttccatgatgatggtggtagctagggctaggccggaagcgatcccccagtggactaggccaaaggagtcgggaatgctgaagaggtcccgggcaataggaaggagggtcaaaccgtacaaggccatgcagacgaggaaggcaaggaggatgtatttgttggaagtgaagcccaattcagcaatggtcaggtttttagaccgggctgggaaaacctggagacttctggataagatgagggttgtgaaggccatggccacgctgatttcaacgctgtaggataaaccaatatactgggacaggataacggccagggctatggtaatccccctaaagaggatattttccagggttccaccagcaaagagaccttcattggggtctcttgggtcctcctgcatcagttgggcttcaatcggctccgcaccgagggcaatagcagggagggcgtcgttgaccaggttaataaagagaagctggatggtggtaaatggggccacccaatttaagatcaaggccacgataatagccaagacagccccaaggtttccggagaagaggtaggaaatcgattttttaatattactgtagacattccggccaacttcaaccgcattgataatggagacgaagttgtcatcggtcaagatcatggcagcagcatcttttgcgacatccgttcctgaccccatggccacaccgatgtcagcttgtttaagggcaggggcatcgttaaccccgtccccagtcatagccgtaaccttgtctttggcttgccaagcatcgacaatccggattttgttttcaggagtgacccgggcatagactgaaatggattccaacttctcttccaattctcggtcggacatgtcatctaactcactaccagtgacagccaaatcaccttcacggaagatttccaagtcctgggcaatggcctgggcggttgtcttgtggtctccggtgatcataattggccggatgccggcatttttggcagtttggatagcatcgtaaacctcttgtcggggtgggtcgatcatagccatcaaacccaccaggataaggtcattttcatcatctaggtctaagttatcggaagggtggtctttataggcaaaggccaagactcgtttggcttcttcagcaaagtcttcattagcctggataaaggcttctttatcttcttggctaaggtcttggacctggccgtctttaagaatgcggttggcccggtcgaaaacgacatcaggtccccccttggttagcatcatttggtctccgtcaatttcatggagggaggacatcaacttccggtcagagtcaaaggggagctcggcgattcgaggatagcggtcgcggaggtcttgatagtctaagtctaaatcttgggccaagagaataaaggctgcttcagttggatcacctgctagagtcccttcctggttgacataggaatcatttgccaagatggcgattttatagaggaggtcttctgccggggaccatttgtctggatcctcatcttggaagatttggtcttggtcaggtaggaagccatccactaccgtcatcttgttttgggtcaaggtcccggtcttgtctgagcagataatagaggttgatcccagtgtttccactgctggtaggcggcggatgatggcatgtcttttagccattttgttggtccctgtggagagaacaatagtaatgatggactggagagcttcaggaatcgcagcaacagctactgccacagcgaacataaaggcattgactaaggaaagggtaaggttggaagtccccatggtcaaaattcggtaacttgaaagggcaaatataaagagagaaaggattaagatgccccagcccaacttcacagaaaatttcccaacctggacctggagaggggtttccttggtcttggctgactggatcaaagaggcaattttacccatttccgactggttaccggtttcggttactaaaaattttcctcgaccattggtgaccagggtgccactgtagaccatgttaattcggtcagctaggggtgttttctcttctacttggccgacttccttactggcagggactgattctccggttaaggctccttcgtccacctgcagacttttagcttctagcaagaggccgtctgctgggacctgatcgccaacttccaaatgaaccagatcaccggggacaacttggtctgcttcaacttcaacttgctggtcattgcggtaaactactgctgtgggagaagacaggttgcggagggactctagggattcagctgcttttttctcctgaaccactgtaataatggcactgaggataacaatggctaggacaactagggattcaaaaatctcacccaagaaaatttggaccagggccacgagcaagaggatgatcaccatggggtctttgaaattttctaggaacattttaagggtggacttttgctcctggtcttggatttggttggggccgtatcggtcgagccggtcctggacttggttgtcagataagccctctaagctagcatccaaatggcttaaagcctcatcttgcttcatagcgtaatatggtttggtcatagttgatcctttctcctttaaaagagcacagacaggattaaaaaaagacgcatgcaaaagctaggacttttacatacgtctcactatttaatccagtaccagaaacaaaaaagccatcgtttcggttggtggcactggaacagaaatctgtcagttactcccgtattgatttataatactaaagtaattatagcgactggatggactgaaaacaagtcttttaaattatttttttattaaaaagataaaagtaaaatctccctaaggcaagaaaatctttttcgatatcttcttttattcgtgatagaatgatcgtatcatattttagactttattagtagttgaaagcaaaagatttatgtatcataaagtaaaggattagtaaaatgttatttgatcgtatcgtagaagcctttcccgaaagcaacatcaaaaaagatgaacccttgtcctattactcttacactcgaacaggtggcccggctgacattttgattttcccagaatccatcgatgaaattgtgacgattatcaagtggatcaaccaaagtccggaataccaagctggcgatctccccctcactatcttaggcaatgctagcaacctgatcgtaaaagatggtgggataagagggattaccatcattaccaccggcattaaaaccatttgtcacgaagagaaccggatcactgcgggcgctggagcagctattatcgatgttagccaggctgccttggaccatagcttaactggcttggaattcgcttgtggcataccgggtagtacaggcggggctgtttacatgaacgctggggcttacggtggggaagtccagcattgtgttgaaagtgtccaagtcttgacccggcatggccagttgaagacctatagtaatgcggaaatgaacttctcctaccgccacagttatttgatggaagaagacgatatagtagtctccgtgacctttaaattggagtcgggcgactacatcactatcaaggaaaagatggatgaattaacctaccttagagaatccaaacaaccgctggaatacccctcttgtgggtcagtctttaaaagacctgaaggccactttacggggaaattaatccaggatgctggccttcaaggattggtccatggtggagcccaggtatccgaaaaacatgccggttttatcattaatataggcaatgctaccgccagcgactaccaagagttgatccaacatatccaagaagaagtctaccggatttacaaggttaagctggaacgtgaagttcgcattataggggaggattagttagaaaggggcaggcgtcatgacagacttaaagaaagcagttggctatcaggcggccgaatacgttgaagatggtatggtggttggtcttggcacaggctcgacagtagcctacctactcgagggtttgggcaagcggctgaaggcagaaaacttgtccataacagctgtcacaacttccaaccggaccaaggacaaggcgaggagcttgggcattcccacccttcccctggaccaggttgagcgaattgatttgaccattgacggagctgatgaggtggacccccaatttaacgggatcaaggggggaggcggggcccacctttacgaaaaaattgtggcccagcattccaaacaaaatatctggattgtcgatgaatccaagttggtggaccagctaggggccttcccattgcctgttgaggtggtcaaatttggtagccagcacctatttgaccaattggtggcagaccagctcaagcctagctggcgtttagatgaccagggccaaaagtacttaaccgatgacaacaactacatcatcgacctcaagcttgactacattgaccaggtccaagaattggcagcccaactcaaatcctatactggtctggtggagcacggtctttttatcggcttgaccgaccgagtcctagtgggccgaccaagtggggtagaagttttaaccaagtagccaacctcccatcaagcaagaaagcccgtcttctaaagccgggctcctatcctcaagagcatactggggttatcagtatgctctttgattttaacctggccactgccgggttaaaccactcattaacgtagaaggtgtgatgtaaatgtttaaaaaagttctcaagccggcctttccggtcatggtttcctaccttgttctttccctggtttgcgggattgtctcctttcaggttggctttacccccctgcagattttacttacttccgcggtcttgtattccggttcaggtcagtttcttttagccggtctctacggggctggagctagcctggtgtctattatcattaccctggccttcttaggcctccgctttgtcctgatgtccatgtcttcctcccgccatgtccgccaaaagactacttggttcgactttttctttagcatgaccatctcagatgaaagctttggtgtgaacacagtcatgtttagtcaacctgactggacagcagaccatgccttggctttgaacttattgaactacggcatttgggttctaggatccggactaggagccctcttggtcagcgtggttgacttggacacctctattattagttatggtctaacggccatgtttatctgcatgacagttgagcagtttgtagaccgttactacttatatgctggcttgatttctgtagtttttaccattattgccctcgttatcttgcaaaactccctgggcatagtggtgggggccttgctagcatccttaatcggctttcaattaaaatggaccaaggagggacaaggccatgaataatgattttcctattcttttagcggctttcgcagccatcaccctgtcaaccaagttcctgcccatggtctggttgaaaaataaaaatctctctcctaaattcaaggcttggatgaactttatcccggtaactatttttgccgccctagtcgcctccgatgttttctttgtagaagaccaagtctccttccacctcttggaaaaccccctccttatcccctcccttattgtcctcttggtatcagtgaagactaaaaacctgatttatgccatcttgactggggtgggctctctctttctcttccaagttcttctttaagaaaagagggactagctctaatagttcagtaaaaatcttggtgggcaatcttgctaacgctaaatattatagaactaaaatgaccttggtgaatttctcaccaaggtcagattttgtagaatcattaccttttgattccattttttcatcaccatataaaattgtactctactagctaattattaattctaataagccataaaagacaactcctaaaattgctgtccatagccagccaatcgaaatctgtgtaaaataattaattgcaaggctaagtaagaaaaatgggaccttaaacaatattaaccgcagccaccactgtggtatatgttggcgaatactatttttttaccatctttttcaaattccttccctcctttcggtattagattaattgaataattaagcgtttgcaagttatatactttattaatcaaagtaataatgaatttttaccattaaaaagtttcgtaattgacccttgagttattgaaataatattagtcatgtttccccttacttctatgaacaagcccagtgaagtcgatgatgtcatcgaataggtagttatatttacttggatggtcatgggaaatcacgatgtaatgtttatctgttacttgactcactatttcccagaacttatagacattttcccggtctagattactagtcggttcgtcaaagaagacaagattgcgagtgctaagaatacctcggaggagcaggactcttcgtttttcaccactggacaggtcatcgatggaggtggattttataagatcaggtcctagaagacttttgatggtaaccatttcctggtcacttaagtctcgtccaaatgcgatattaaagaagacactgcccttaaacaagttattggagggaccgatataggcaatattatcaattgccccagccttatctgaaacttcctggtcaatataaatatccccttggtattccttcctattttttaggaggatatccatatagagacttttcccagttccactcggtccttggattaaataatttttatctttatggaaggttaaattatcataacttaaacaagtcttaccaaagttaaccgagatgccgtcagattcaagcttgtcttggatggtgtagcttttgtcatttttcgaaccaacttgatttaagtctgcttctatttccttgcgaatttccttggtactgttaatattatttaaattttgtgaaaagaccaggataggcatacttagttgctctaccaagccaatcagagttaaaacagtacctgcttggatttgaccgttcagaactaggatagtcgaaaagatcaagatcagtaagtgggaaaagtaggataaagaagaattcagtatattggcattgatttttgtattctggtttcttttataagttaaaacctctccgataatggattggcttaagcggttaaagatggtctcctgtaaatggaaactcttaactgaccgcatattgctaaagtaattttcatagaggtccaggttgcgccctttataaagttggtattttccctctgttaccgaaagtttattcttgtaaaagcgggtgaccaacaagggaagaaataagaagaccaagaggccaagtccgatataaaggttaatgtacatcaaagcaaaggtaacaaagaccattctaagtagcaggtagatattattaaaaatagcccgataataattgacttccagtcggtcaatcttattggatagggtgttgatcgtagcttctttttcagcaattaaatggtcaaaactatttttttggagaaattgcctagacaaactactcttaatatcaattaaaacattggaataaatgtagttatgcatcttccattccaagtagtaaaagacaagctcaaaaataataagggtcgtcaaaaacagaccagttccaactaaaccattgacatttcgctctatagcaaattggaagaggtcgcccttgacaaattgaatataagttgcgattgaggttgaaaagattaagattaaaaccaatacaaagaccaagctattttttactttaaagaccaataaagttcctcctgactgggctagactaccattattatagtggaaaacacctttttattttcctccttgttatgttttctcaaataattatattattttgtaaattaatggtatagtatttatgagtaaagtaaaaaaatgtctaaaattttagacattatttacggaggaatatatgatatattataatattgaattaataagaataaaaaaaggcttgaagattaatgaattaatcgatggtattatgtcaagggcaacttatcacaactttaaaacaggaaaacatgagattagttacttagacttttttaagctagttaaaagattaaatttaatgcctgatgaattaggagaagtggttgttgatgagactacgaacatgttcaaaaaatacatgaatcagttgaaagacttgtctgaccaaggggaggtcaatagcttattggctttaaaaagggaaatgaaccaaaatagaaatgggcttcccaataaagacctgcttgtagaattagtggatagccatatccaccagttacaagggcagacttttgatttaaatcccggttctttggtttctcaatacttgtttggagctgaggggtggactcagtatgagaaaatcatttttaatcttagtttgcctttcctccgaagtgaattgattgatatctacttagataggattttatcaactaaaatggatgatcaagatcataggcactacggtgatggccattttagactggttatccgagccttgatcatttttattgaaggcaaggactatggaatgatcaagaaatggtcgaagaaggttgaagaaatgccattagatccttcatttgtatttgagataagcttaaaaaagctattccatttattggtggactatattctagaccatcatttgtctagccttgataaaagtaagcgaatggttaaactattagaagaattggattgtcagccctacgccgacaacttgactaatataattacttttgttgaagaccattatgcctagttgggtcctcatcctctctttaaagacgatctgtaaaactgatttctattcctctatttaaaatcagcagcaaacaactcgtaaaaagctaaagttaaagtcatatgctgttttaaattcttctggatgtcagtatccattaggtttgtaagtgatgactcaaagacaagggtggttagactatggataagttagttttagacttgcatgatattgaaaagagtttcatgcaccaagatattttaagtattgacagtttgaaggtttatgaaagtgaacgaattggagtcgttggtagcaatggggcgggcaagtccaccctcttaaatataattgcaggtaagctaaaaccagacagtggccaggtcacccgcaatatagattttgaatattacgagcagattgaaagccttgacccagactatgaaagaattgaccctgaatacctttctcgcttggagcttccggattatgaagccagtaattttagtgggggtgaagggactcgtttacggttggcggaatttttctcgacttaccactttggtttgttgttagatgagccgaccacccacttagatagtcaaggcattcaatttttaatcgaccaattaaagtactattatggtaccctaattgtggtcagccacgaccggtattttttagatgaggtcgtagacactatctgggaagtcagcgatggccgtgtaaccgtctatcccggcaactactcagactaccgagacctgaaggaagaagaattgatcgagcaagaacataattatgaaaactttatcaaagaaaaaaggcgtctagaggaagctgcccaggaaaaacaagaccaagcccaaaaaatggaaaatgtgagccaaaagcaaaagaataaggccatcaaacccaaccgcttggcttcttctaaacagaaagatactgtccaagcagcagcctttaaatcagccaagtccatgcaaaaaagggctgaccaattagaggaagtcgaaaaggtagaagaggacaaggaaattagctttcctgaggccaaaaatttggccatccacaaccgctttcccattatgggggagaaggtaactatccaagttggtgaaaaagtcttatttaaggaagcagactttcaactgcccctagggaagtgcattgggattgcagggccaaatggttccggtaagtctaccttgttggactatattgtaaaagatgggccgggaattaccctgtctagtaaaattgttttttctatttataaccagcacgattaccagttaaaagacaaaaaaaccatgttggaattcctagaagaggattcctatatcgatgaggccttaatccgaaccattttgaataatctgggttttgaccaaactgaaatcaccaagaaattggtctgcaatttaagtggtggggaaagaacccggttagtgattgccaaattatttaccgacccaagcaatgtcttggtactggacgaaccaaccaattttattgacctggccactattgaggcccttgagtcactcattgctagctaccaggggacagtcttagtaacctcccatgataaatacttcctagaaaaggtagctgaccaaatttggcaggtccaagaccaaaaattgaagttagttaaatattaagtcaattacgctagttaaggcaaaacagccatgacccggtttcgaactcggtcatggctgttttttattattgtattttctacgggcccctgcttggacaccggttttcaccgtgtttgggacttggcccgtcgcttggcataaagggttagatcaatctgccgggcctggcaccaggcagcggtttggccggtaatcaccaggtctgtcttcacctggaggtcggcagactttttggctcccaggatggtataccatttcttcaattcttccttccactggtcaatagtttctatggctttattgacgtctttgatggccaggtggaggatttggttagaaatccctaccaggtctgcccccaaggctagggacttgacaatatcaagcggggtccggatgccaccggaggcaatgatctgacttttttgccgggcctccatggcttctaatagcgaaatggcagtggtctggccgatgccttcaaagtcatctaacttgttttccttccgccggtagttttcaatttgggcaaaattggttcctccagagcctgacacgtcaatgtaagtcacaccagcttcttccaaagtctggacggtttccttggacatgccaaagccaacttccttgacaataacaggcaggtctagtccggaacagatggcttggatattgtccaaccattgactaaaagtccggtcaccttctggcatgacaatttcttggggggcattgaggtggacttgcaaggcatcagcctggaggaggtccaccgctcgtttggcattttccaagccatggttggcccctaggttggctaggataatattatgaggattgatctgacggaccacctggtaggaaggggccaaactggggtcttttaaggcggctgaaactgacccggtggccatggccagctggctttcccgggcaatgatggctaatttctcattgatggtctgactccactgagaccccccagtcatggcattgataaaaaagggggccttgaagttgagaccggcaaatgagacagccaaatccacttggtcaagatcagtctggggcagggagtggtgaacaagctggacatcctttaaggggctctcttttttactataaaacttttgagctagggaaacatgttcgttttttcggttgtttgacttagtcatagcaagcaccattttctacaatgtctagtcttaagggcaagatacctgcatccatccattcccggtagatggcttctattgggctctcccttgtgattaggccaatgccacaatctccaccgccggcaccggaagacttggcttggcctccgtatttcgcgacaatatcgcacaagtaggtcaaggctttggtttcgatgactttcccccggctttggcccattgccttgaggagggttcggttcttttggatccaagctaagcttgcctgggagtcagcctggcttaaagactccaccaagccgtcgacacactcttgggattggtctaagaaggactggaagtccaagggggtcctggttattttttgggggtagacagcctgaaccaatttttctgtggaggcaggctggccggtccatccgattaaaagcctgaggtcatggggcaggctgagccggtctagacctaggctaggccaatccatggccaggaggtccttgatggaatggttggagatttgttcttgtaaccattctctatccagggactggtagcggatcacaccagtataagtgcaggctgccaaatcgccaaaagaccccttgctctttagctggatatgggcgatggcagctagtttgaaaatgtctatgtcttttaagtggaggtcgtaaagaaggctcaggcctcggataacagcgatggtaacggccccactagaccccaggccaatttttttgccctggtagtccaactggctcttgatctgaatcccgtaactttttaaaggcagggacaaggattctatgtaggcttccactgtttggatcaccgtttcgactaggtggaaggggtgggaccagtccttaaagctaaagataccatctaaccgctcccaagcataggcctggttgccatatgtttgagacctgactgaagcttggtcgggagatgtttcccaaatgtctaaagtcaaataccggctgactgtcagcaagatcccggcatagccgggggttactactgcgtattcacctgccaaataaagtttccccggaatccttaagctataaaccatgaaaacaccagctttctagttcaaaggtccatcaataaaggccaggcctggacccggtttagctaagacaagatgcttgtcgggccagtcttggctgaggtctgctttgaaggctttaaggtcagcttccctgccaataaccttgacattggggccggcgtccatggtgaagtagagggactggccagccttgcgccggtcccatacttcctgcatcagggctaaactttctttagtccaataggtgaaggggggcttggctgccaggttggtggcatgcattttcagggcatttctttctgcaatggacccaacctggtcgaggtcttgggcttggatagcggacttgatgtctgctaggtcttggtccaggctgtctaaccaggcctggtaaaagtccgacgtctcctgggtcaattgcatgccttggctggaggaaattgcctttggtcggtcgcttacaatgacaaagagcatggcaatatcccactgggccaagtcgatgggcttggcaaaggaagagctatcatcatgacccttttcccactcgacaaaaccaccaaaaatacttcgtgaggcagacccagatcccctgcgggccaatcgggagaggtcagttggggataggccaaggtctaaagcatcagctgaagcacccgccaaggcggccagaccagaagcagaggaagccaagccagctgcagtggcaacttggttgtggctggtaattttggccggccagtcaagctgggcttggtcccgaaccaagtccaggatgacctgggccttggttaaggcggaccctttttcctgtttcccgtctagccataattggtcctggtccaagtctgggtcaaaaactacctgggtatcggtataaaaagcgtccaaggttaaagatagggagttgttattggggataatcaagtccctatcagccttaccccagtacttgatcaaggcaatgttggtatgggcccggcaaatccggcctaactttttcttttcaaaggcctgcttagtcatggttggcttctcctaaggggtggatccaggtttcaatggctcccgctttttccaatttttgggcaatattggaggcatcctggttgctttgggctagggcaatcatgcaaccaccccggcccccaccggttaacttagctccgcaagctccagcatcttgggctgcttggacaagttggtctaacttgggattgctgacagttaaatcctttaagagttggtgggactggttcaaaatctcccctaagccagggaggttattggtcatgattgcttttttagcctggtgggtaagctggccgaggtggtggacaatgtccatggtttgaaccttggcagtttcaaccagcttcgccacatccccaacggcttctttcgtgtggcccttaatcccagtatcggctgcaattaaatagccgtcaacatttaaagggatggccttgggaagctggttgcgtttaaaataaacgggggcaatggagttgacgactgtagcatccagacccgatggcttgccatgggtaattttttcggcaatctcgacataggctgagagggcttcactgcttaagtcgacttggaagtagtgaaagagggccttgactaaggcggtggccacagcagcactggaccccattcctctttcagcagggatcatgctgtcgaccttgatatacaagtggtcgctggactggtctaagtcggcacaaaccgctgtcaaacaggcttgaagccctgccaagtccccgggcgcttggtctaaagatccgcagtagcaagcactttctagatagcttttgccttggtaaggactaacttcaacggtgatggtggctgtggtaaaagggagggcgatggccggcatgttatagacaacagcatgctcaccgattaaaataattttaccatgggcagtgcctttggctacatttttaacaagcgtcatccttttgtctcctttgtctatttttgtttagatacttgtgttatgatgaaatggcaattgcatcctttattctaatacataacatgatatagaatataaagatttatttaaagaatcaaatttgttttaaaattatcagcttttggaggtcagaacatgaacaattcccgtatttttttagtctatgaccgtaaagactggcagtctcttagagaaaatgccagcctttctttaacggaaaaaaacctaaataacttgcgtgcagtgaatgacgtcatatcgatggaagatgtccgagaagtttacgtccccattatccaattactggatgtctacataaaaagttactaccgccaccaggcttccttgatcaattacttgaacctggaccagcctaaaaagtaccaaccctatgtgattgggattgcagggagcgtggctgtgggcaagtctacggttgccaggcttcttaagtccctcttgagcgactactatccggaaaaaaaggtagacctcctcacaacagatggcttcctttatccgaataagattttaaaagagcgagatatcatggaccgcaagggttttcccgaaagctatgatatgaaacgtttgattaactttatgaccgatgtcaaaaataatgttcccaacatccaggtgcccaagtattcccaccaagtttacgacatagtagaaggggaaaggttgaccattaaccagccagacatcttgattgtcgaagggatcaatgtgctccaacttccttctaatgagaagatttttgttagcgattttttcgacttctccttttatgtggatgcctcagaaaatctgattgaaaaatggtacatgcaacgctttggcacctttatggataccgccttccaagaccccaacaactattactacaagtttaatgactgggaccgcaaggaagcttttgcctatgccaaccaagtttgggaaacggttaacctagaaaacctcagggaatatattctacccacccgactccgggctaacctcatcctccataaaacccataaccactacatcgacaagattttactcaaaaaacactgatgtcaatacaagccaaggacccagattggtctttggctttttactagccaaaaactaaaaagggctatcatttgtcattattttagccataggggataataaggaaaaggaggtttgacggatgaaaacttatgacaaactttactacgatggccagtggcaagaagctaagtcggatgactacagggaagtcatcaactcagctaatgaagaagttatcgctaaggtcaaaagtgccagcaaggaagatatcgatttggcggttcaatcagccaatgaagcctttgacagctggagtcagttagaccccaaagaccgggctagctaccttgagcaaatcgcccaagggatagaggatcgattagatgaaatagcagaaacagtagttttagaattagggtcttccagggactttagccaaagtgctcaggcccaaaatgccgttaatgaaatgcgggccacccttaaagattttgcagacttttcctttgttgaccaagtggaccaggggcaagtggtcaaggagggaactggggtcgttgcttgtatcaccccttggaacttccctctcaaccagattcaacgtaagatgaccccagcccttttagccggcaataccgttgtggtcaaaccagcttctgaaacccctttaactgcctacatcttagctgacattatccaccaggttggcttgcccaagggtgtctttaacatggtctttgggtcaggatctagtgtcggggactacctggcagaccacccagatatcgccttaatttcctttaccgggtctactgaagtgggccgtttgatgtaccaaaaagcaggcaaagggattaagcgcctggttttggaacttggaggcaagtcagccatggtcttcttagaagggggcgacttggaagctgcagttaaacaagcggccgatacggtcttggacaaccagggccagacctgttctgccttgtcccgcttaatcgtcccaggtgaccggctggaagacaccaaggctatcctcaaagattactaccaagacatccaggtcggtgaccctagccaagatggggtcaaggtcggaccgatggtgtcaaaagaccaataccaaagggtcttagactatattgcaaaaggtaaggaagaaggcgcccaagtcttactgggtggccaggcggtggaaggtcctggttactttatccaaccgaccgtctttaccgaagccacaaatgacatgactatcgctcgagaagaaattttcggaccagtcttgaccgttttaacctatgatagtgtcgaagaagccattgctattgccaatgactccccttatggtttgagtggggcggtgactgggcctaaagatgaagcttttgaagtggccaaacgcttgcggacagggaatgtgaatgtcaaccaagccagccgcaatccaagactgccttttgggggctacaaggagtctggttttggccgagaaaacgggatttacgccctcgatgactacctggaactcaaggcaatttttgaataagtccagctcactaatttagaagcaaactaaatgagtaagaggcctgtcagctttattctttgggaataactgacaggccttattattatttgctgtcaacctgccttatgccaggcttgttactatccattcctactagttaaatgcgttaacattaatttaatagaatgatataataaggctaaatgagaatggactaaactaggaggactataatagtgacccagtatgcgaatgattctttagccttgcacaccgacctgtatgaaattaatatgatcttaacccactggcagaaggggaatgctgaccgccgtgctgtttttgaaatgtacttccgagacaacccctttggcatgggctatgccatttttactggcttggagcggttgattgattatatcgaaaatttgcacttttcaaaaagcgatatcgactacctgcgggatagccaaaactaccctgaagaattcctggattatctggccaattggcactttaggggcagcatccggtcctacaaggaaggggaggtggcctttgccaatgaacccttgattcaggttgagggccccattgtggactgccaattgattgaaactgctcttttgaatattgttaatttccagaccctgattgccaccaaagctgcccaaattaaaaccgttgcccaggaagattctgtcttggaattcggatcacgccgggcccaagagattgacgccagtgtctggggtgcccgggcgacctatataggcggttgtgacgcaactagtaatgttttagctggcaagcgttttggcattccaatagctgggacccatgcccatgccttgatccaggcctaccgggatgaggtggaagccttccgtgcctatgcggagacccaccgagattgcattttcctggtggatacttacaataccttagattctggtgtccccaatgccatccaggtggccagagaatttggcgacaagattaacttcaagggggttcgcttggactcaggcgacttgtcctacttgtctaaacgggtccgccagcagttagatgaagcgggtttccccgaagctaaaatttatgcttccagtgacttggattcgtcaaccatcctaaatttaaaaatgcagggtgctaaaattgatgtctggggggtaggaaccaaattaatcactgcctatgaccagccagccttaggaggggtttacaagttggtttccgtccagggcaatgacggccagatgcacaacacactcaaactaacaggggatgccgacaagatctccaccccaggtaaaaagcaagtttaccgaatccacagccagcaaggacgcaaacctgaaggggactatatcacttttgatgatgagaaaattgatgaaaaaggcgacctcttcatgttccaccctaaacacccctacatcaataaaacggtcaaggactttaaggctagaccccttctccacgacatctacattaacggggaattagtctacgacaaaccagatctcgagagtatccgggcctattctgaccaatctttagatgaattttacgaagaatacaagcgggttttaaaccctgaaaattacccggttgacttatcagaagacctttttaatgctaaaatggaaacgatcaaagaatttagacaccaggcccaatccaaggagacgagaaaggtttttgatgccaaagaaaaaggtgaagcttaatgggagacgatttaagagaagaaattcttgaccgaatgaaggtccaagcccaaattaaccccaatgaggaaattcgccggaccattgactttatcaaggactatctccaggcccaccccttctttgaatccttaatcttgggcatctccggtggccaggattccaccctcctgggtaagctagcccagatggcctgccttgaactgagggaagaggaggggtctgacaagccaatttttattggtatccgcctaccttatggggatcaatttgatgaagcagaagcccagcaagccctcaattggatccagcctgaccaggctctgaccattaatatcaaagagtccgttgatggcctggttgacactttggccggccaaggcattgaagtttctgactttaacaagggcaatatcaaagctcggatccgaatggtggcccaatatggcgtagcgggtcacttccacggggcggtgttaggatctgaccattcagccgaaaatgtaactggctttttcaccaagcatggggacggcgctagtgacctcaaccctcttttccgcctaaataaacgtcagggacgggccctgcttgaggaattagggtcccctaagaacttgtaccaaaagacccccacagctgatttggaagaagaccagcccggcttgtcagatgaagacaagttaggggtttcttatgaagccattgatgactacttggagggcaagccagttagccaggaggaccaggcaaccatcgaaaaatggtatcaacaaacggcccacaagcgccacttgccggtgactatctttgatgatttttggaaagaaaaaaattagaaagaagtggaaaaatggcaagcgtttttactaatgcgaagatttactgcggtaaccaggtgattgatccaggctttatccgttttgaccgagatatccagcaggttggttccatgacagactaccaagaagaagaccaagaccaggttaaggatctttcaggtcagatcattatccctggttttatcgatatccatagccacggggggtacgggattgacaacatggatgctgaccctgacaagattgatgagatggtggactttttcttaaacgaagggattacttcttactttgccactaccatgtcccaaactgcccctaatattaccgctgccatggaagctattgcccaagccatgaaaaaaaacgaccgaatcttaggtgtccacttggaaggcccttttattaacgagaaacacaagggagcccaatcagctgaccacattgtcccagctaacttggacctcctcaaaaaatggcaggacatcactggtggtaaaattaagttgattacttacgcccctgagcagggaaatgttaaggcctttgaagactactgcctggaccaaggtattgtcctttctgctggccatacggatgcgacttacgacgtcttagaccagtcccccatcagccatatcacccacctctttaacggtcaaagagggatccaccaccgggaacccggcactgcaggatttggcttgttaaaaggggacgacattaaggttgagttgattgtagacggccaccatattgaccctaaaatggtggactttgcctaccggatgaagggggcgaagggcattgtcttggtgacggactccatgcgggcgaaaggtttgccggatggtgagagtgagttgggtggtcaaaaagtaattgttaaagacagcaccgcccggctagaaagtggttccttggcaggtagtgccttgacctatattgacgcttttagaaatatgattaactatagtcattgttccattgaagaggctgttttaatgtcttcgaccaaccaggccgaggagtttaaattagacggcaagggctatctggctcaaggttatgacagtgactttttggtcttagacaaggacttgaatttgaagcaaaccatcgcagcaggtcaggtgcacgactgccaataactggcagatagggggctaacattgacagaccaagagttatctgtttacatcaagattcacaatcaaatgcgagagcaaattaaacaaggccagtggaaggaaggacagaagatcccttccgaacgcaacttggccgaccgctacaatgttagccgaatgaccgctagagcagccatcaacagcttggtggctgacggtttactagaacgccgggtggggtctggcacctatgtttctgttagtaagattaaagaaaaactcaacggtctagccagctttactgaaacggttgaaaagctgggcaagcacccctctagcaagctagttgcctactacactaaaaatgcgaattccagtgaagtggataaattgcagctccaagcaggtgaaaaagtcctggtcttggagcgggtccgctatgctgaccaggtccccatctgctatgaacaggcatccatacccaacaggattgccgaccagctgaataaagaaagcattaccagtcacctctatcagagcttggaggaggaaggcattcttcaagtagcctatgctgaccaaaccatatcagctagctgggccaatgaagctatggcagatttactcgaaatcaaccggggcgaccccatcttaagcttgcgacaagtcacttacagtcagacaggccaagcttttgaatacgttcggtccaagtatgtcggagaccggtatgaaatggtcatccggtcaagcaaataaaaagagtcttgatgggattggcccattaagactcaacattataggaccataaatagtcaaaagagcaaggacaggctagttcagcttgtccttgctcttttctttgtcaaatagcgtcggcgaggtgaaagggagggttgtccctgtctttttgcttgtcgactagttggtaattggaagcaagtgccggtttttatacagtaagcccgggacgggtgatggattttttgggagtttggacttgactggactggccctagaccactaattgtcgcgttatcgccccataactcgtttattgctcagcaattgtcgcgttagcgccccataactcgattattgcttactaattgtcgcgttatgaacttagcttgaaaatcacctatttactagatcagttggcaatcctagaatggtctatctggagtttgagacctttctccattgtcgcctttcaagtccgaaagtaccgaatggctaacccattgcaacctttcaccagcaaataagaggttattgccaaacccgtccattagaaaaaggcaactggaaaaagttgcctcaaaaacagtggctctattaaactagcacgaagagcctttttttattcaattggctatcatttaggattctagttcctcatctgtttgcaagtttgccctaccatcatggagacctttaacctccaagtggtcttggaaggtatctgacaggtcttccaaactgtctgggtcgggctctagtccataaacattgaagccgtaatgagggaagaagattgttgtgtcagagccatccatcaggaaagtctcaatatcttgtgctgcctctcggtagttcatggccaaggtcagcatctgctcaccatctaagttggtagacaggtggggggagatggcatttaaaatggggttaaacttggccaggacattcatggtcgtgaattcccgggccagggccttgatgactttttgctggcgttcctgccgaccataatcacctttgggatcctgcttccgcatccgggcaaagcccagtgcttcttccccgttcagctcttgccagccctcttggatttcgataggttggcccccacccaaactattactttcagtaaaggcaaggtcagacttaatccggattcccccgacagcatcaaccaagtcagccaaaccttggaagtccaaaatggcgtagtgggagatggggatgtctaggagtttttcaacttccttgatcatgaggtcaatcccgccataagtgtacatggcattaattttctcagtaagaccaaaatccgtttcgaccagggtgtcccttgggatggagacgagtttaatatcttctgagtccggattgatgctagccaccataatggtatcggtccgtgaagtcagaccattatccatatccatgcccagcagtaagatagaaaaaggtttcttctcttggatctggttgtagtctaactggtcttgtggtctttcttcttgggctacagaaacttcttggacaaattggttggttcggtaggcataataaccaaagataccaccaacaatgagcatgataccagcaataaaaaacaagactatccttagccacttattctttttatgttggttaccacgcataaacttcctctttctttaattgatttcttggtcaatatcaatgtaagctttggcacccaggtggaaactagcctggtcattggtccattcaatcacttctgacttcaattggtctactttttcaggttcgacaaagcatttaaaagtaacctggtctgtgtattcggtattgtttaagaggtagtcggaccctctcagtgcattttctaaactgccggaaaccgggtagggaacggtcacatcaagggcttgcaaggattgacgtttgactacaccaatagacttcactgcatcattaacagccccgctataagcccggatcaagccaccagcacctagttttttcccgccaaaataccgggtgaccactgcagtcacattcttcagttcccgctttttgaggatttctagcatgggtacaccagctgtcccactcggctcaccatcgtcatgggccctttgaatgtcatccttcattccaatagtgtaggctgagcaattgtgggtggccttgtagtggtcttttttgacggactcgataaagtcattggcttggtcctcggtctctgttcgagatatctggcaaataaaacgggacttgttaatttcaatttcataactgcccgcttctttaattgtgtagtatgattccataaagacacctgcctatttccaatacattgtaacacaatagtcggttaagtcggaaaaatctttataaaattattaagaagaaaaatgattttccatcttttttgcgtatatataggtgaggtggtgaaatgaaagaggaattactatacggccggcagcttttaatccgggaactacccccagatttcgacccggcctccaagggaaagcttcaaagctatccggcttttgaggaaaaatctggcaagtggttttgccgccggtgcggttccagggttgccccgattaaacccactttttgccaatgtggccaggaatgtggctactgcacccagtgtattcaaatgggcaaggtcaaaagatgcctgtctttttatcatattgaagaggaaaatcgtttccccaagataaaagatcccctggcctggcaaggcaaattgtcgagtcaacaagacaaggctgcccaagatattgttcaagccgtcctcaaccgtcaaacccttttggtatgggctgtggccggggctggcaaaacagaaatgctctttaaaggcttggccctggctattgagaagggttaccggatcggcttggcttcaccccgagtggatgtttgcctggaactttatcccaggctccaggcagccttccctaaactggctatttccctactctacggtcaaatggaagaagactatgcctatcgtcagatgaccattgctaccacccaccagctcttacggttcaagcaagcctttgaccttctcatcattgatgaaattgatgccttcccctttgacactgaccttatcttgcaaaggggggcagaccaggcccggaaggaagaatcggctttaatctacttaacggccactcctaaccggcagatgcagaagcaaatcaaacaaaagaaaatccaagctactatcctgccggctcgctaccatggtcatcctctaccagttccccagctgaagcgatctaaaaattggcaagccaacttactcaagaaggctggaaagaacccggtcgaccgggccatcgccagtcgcctccaagcagggcgccgttttttgattttcctacccaatattgcctggtccaagcaatgggagggggtccttgaagccaagtttcctcaggctaactttgctactgtccatgcccaggaccccgaccgtaaaagcaaggtcatggccatgagagggcaagagttggattttttagtgaccaccaccatcttggaaagaggggtgacctttcctaatattgatgttttggtagtaggagcctgcgaccgggtgtttaccgaatcttctttggttcaaatttcgggacgggtaggccggtcacccgactatccgactggggacatcctatttttttatcatgagactagtctggccatgaagcgggcagtcaagcaaattaagcaaatgaataaactagcaagaaagcggggattattacatgaatgacctatgtatccactgccaggaagagtttcaagcacccatttcctttaaagacctagtcttgtggaagcccattgaccaaggcttggtttgtcctaagtgttttagccgtttccaaaaaattgacccaaccagtatgtgtccaacttgctccaagtaccttgacagtggggaggtctgtgccgattgccaagcttggcaagaccagtatcctgacatatcgggccggcacttggccttgttttactacgatgattttgccaaggactggatgtttgaattcaagatgaagggggatatccgctatggtctggtttttggccaggtcttgaaagactgcatcaaaagtcattttcccaaccacctactggtccccattccttcttcgacaccccactttaaggaccggggttttaaccaaatcgatgttatccttagtgtcctgtcctttgaatatgaagatttactggccaacacgagccatggccttggccaggctaaaaaaactagagcagaccgcttgcgaaccgaccagcccttttcctaccggggggcaggggacttgtcccagatggatatcctacttgtcgatgacgtttatacgactggccgcaccctttaccatgctaaaaggcttttaactgaccagggagctagacgggtggacagtttgtccctcttccgttaattgccatgactcaactatcttcttaagtcggcggacatcttcaactaaggacctttatggcagaagggacaaaagcaaagtgttctccgaccttgtcgctaggcctagaccttaccgaaaaactgtcagccgggaggcatcagttcttgctttatcaagtaattctacctatccttgccaatttctaaagtaagaattttacaagttggacttcttgataaatgaagcgctattacctataatgaaggtaaataaagagttaattttattaattctttattacgaatagcttttgctagactcggtctagtagaagatggaagggtgcactactatgttaaggttcaatatacgcggtgagaacattgaagtaaccgatgctttacgcgactacgccgagaagaagatttcaaaaatcgagcgttattttaacaaggaattgaccaatgtcgaagcccatgttaatttgaaaacttactccgaccgaagtgctaaagtggaagttaccgtcccactttccaatattgtcttgcgggctgaggaaacctcccaagatatgtacggcagtattgacttagtggcagataagcttgagcgacaaattcgaaagtataaaactaaagttaatcgcaagatccgtcgggaaaacctatcccggccggaagccattgaccctgatttgtgggatagtgatgtgccggctttggatgataatagcaaggatgatggggatgtttcatcttctatcgtccgcatcaagcaagttgacttgaaacccatgagtccggaggaagccgttttacagatggatttgctaggacatgacttttttatttttgaagatgccgaaacagaaggagtcagcttggtctacaaacgccacgatgaccaatacggcctactcgagacctaggctaagataatctagccaaccatttgaattgacctttaaaacaaagcgttcttaacagtaaaattattgttaagggcgcttttaatgcagtcttttatttctaaatcaatcatggtatgatagggaagtatcttccggatcatgtaaattgaaaataatgaatacaagggatatggatctataatctagaggtgaaagaatcagatggcgaacttcttaaaacgtctttttgataatgataaaaaagtcttgcgtcgttacggtaaaattgctgataaaattgaagctttatcagatgatatggctgagttaacagacgaagaattacaggcccggacccaggaatttaagtcccgatatgccaatggcgaaagcttggatgaaatgctagtagagacctttgctaccatgcgggaagcagctaagcgggtcttgggcctttaccccttccgtgtccagttgcaagggggaatggccctgcatgaagggaacattgctgagatgaagactggtgaagggaagaccttaacagccactatgccggtctatttaaatgccatctctggcaagggtgtccatgttgtcactgttaacgactacctagccacccgggatgctgaagagatgggtgagctttaccgttggatggggctgacggttggtttgaacctcaactctaagaacgccgacgaaaaacgggatgcctacaattgcgatattacttactcaaccaataatgagttaggctttgactacttaagagacaatatggtggtctacaaggaacaaatggtccaaagaccccttaacttcgctatcttggatgaggtcgactcgattttaattgacgaggcccggaccccccttattatttcgggtcaagcagaaggatccacttcttactacactcgaactgacttctttgtcaagggtttgaaagaagatgaggattacaccattgatgttcagtccaaaaccattaacctaactgaagaaggtattgaaaaagcagaggataccttcaatgttaaaaacttgtatgatgtggaaaaccaaaccttgatccaccacctagaccaggctttacgagctaactacattatgatcttggacaaggactatgtggttaaagatgatgaagtcaagattgtcgaccagtttacgggacggatcatggaaggtcgccgttattctgacggcctccaccaggcaattgaagctaaagaagatgtagaaattcaaaaagaatccaaaaccatggctaccatcacctttcagaactttttccgtcgttatgccaaactctctggtatgaccgggacagctaagacagaggaagaagagttccgagaaatatacaatatggatgttattgctgttccaaccaacagaccggtagcccgggatgacaaggatgatctcctataccctaccttggacagcaagttcaaggcagcagcccaggacatcaaggaacgtcatgaaattggccaacctgttttagttgggaccgtagcggtggaaacatctgaagttatctcccgctacctgcaagaactagacgtcccccatgaaattttgaatgccaaaaaccactttaaagaagcagatattattgttaatgctggtcaacctggtgcagtgaccatcgccaccaacatggctggccgggggactgatatcaagttaggccctggtgtcaaagaactgggtgggctagccgttatcgggacggaacgccacgaatcacgtcggattgacaaccagttgcgtggtcggtcaggccggcaaggggacccgggtgtttctcaattttacttgtccttagaagatgacctcatgcgacggtttgggtctgagcggatccagtctgttttagagcaactgaaaatttctggtgacgatgcagtgatccaaagtcggatgatctcccgccaggtagaatcagcccaaaaaagggtggaagggaacaactacgatacccgtcgaaatgtcttgaaatatgatgatgttatgcgggaacagcgggaagttatttacgcccaacgccaagaagtcattatggaagaggattctctttcttacgttgtcaatccaattatccgtcgtaccatcgatggggctgtgaatattaatacccaaagcgatgactcctcaaaatgggacttagaccagttagttgattttgcccaccaagttttattgccggctgattccatttccaaggaagacttgtatggacgggaccgggaaggcatccgggactaccttaaccagttgactactgaagcttaccaggaaaaaatcagtcaatttaatggagaagagcaagtcttggaattcgagaaagttgtcaccctccgtgtggttgaccgcaaatggaccaaccatattgatgagatggaccaactccgacaggggattggcctccggtcttacggccagttcaatcccttgactgaataccagcaagaaggtgcccgcctctttgaagagatgatcggtgaaattgaatacgaaatcacccgcctattgatgaagtctgaaatcagacaaaacttacagcgggaacaagctagtgcggacggcaagggtaagaaagctaaaagaccggctaagaaagatgactatgaatactcccatgacgacgaaaccaataccgtcacgggataagttcaggaaaacggtaaaagcaggggcaaggccacctgcttttctttttttggaggtaaaaatggaacgatttgaaatagaacaagatttacaaacaatgcgacaaacactagccaagtatagggggtctctttgacctggaaaaaattcaggcagacctagcagaggcccaggaaatcatgacccagcctgacttttgggatgatcctgacaaggccaaagaagttattgaccagagtaaccaattgaaggagaaggttaatttattccagtccgtccaaggcttggtcgaggaaaacgaaaccatcctagccatgctagaagaaggggaggaccaagacctcttggctgaattggaagccaacctgcaaaaggctcatgaccggttagatgagttagaaattagcctcctccttaatgaggaatatgatggcaacaacgccatcttagaactccaccctggggcaggggggactgagtcgcaagattggggccagatgctctaccggatgtacacccggtggattgacagcaaaggcttccagtatcaagtcctagactaccaagcaggggacgaagcaggtattaagagtgtctccctcttagtcaaggggaccaatgcctatggtttactgaaagcagaaaagggtgtccatcgcttagtccggatctctccatttgactcatcgggacggcgtcacacctctttcgtctcttgcgaagtgaccccagaattggaccaggatatcgaggttgaagtcaagccggaagatattcgaattgatacctaccgggccagtggggcagggggacagcacgttaacaaaacagattcagctgtccggataacccaccaacctacagggtttgtggtccagagccaagctggccggtcgcaactccaaaaccgcgagcaagccatgaccatgctaaaatctaagctttaccaaaaacaagtagaggaaaaagaagctgaaatggctcaggccagaggcgatcagaaggaaattggctgggggtcgcaaatccggtcttatgttttccacccctactccatggttaaagaccaccggaccaagttggagtctggcaacccggatgcagtgatggatggtgacctggatccctttattgaagcctatttgcggtcacaaattgatttatgattgaaataatattgtaatccccttaacatattgatatattacactgaaagagctagccaagtttagtccagtgaaaagtgaataggtgaatagcatgataagaatggaaaacgtttataaaaaatacgataacgggattacagctttaaataagttgtcggtccaaatcgaccaaggggaatttgtctacttggttggtccctccggggcaggtaagtctacctttatcaagttgatttaccgggaggaggctccaaccaggggaagagtccaggttaatgattacgatactggcaaaatgaagaaaaaatatattcccaaccttagacgggaagttggggttgtttttcaagacttcaaactcctcccccgcctaaccgtttacgaaaatgttgcttatgccatgaaggtggttgagcaaaaacctagggtcatccagcagcgggtcaaccaagtattggacctggtgggcttgaagcacaaaggaaaaatgttcccagaccaaatctctggtggggagcagcagcgggtggccattgcccgggctattgctaatacccccaagattttgattgctgacgaacccaccggtaacttggacccagatacttcctgggaggtcttgcaagtcttggaggaggttaaccgcttaggaacaacggttattatggccacccaccaccaagaaattgttaaccaggccaaacaccgggtgattgccattgaaagtggccggattgccagagatgaaatggagggtgagtatggttaccaagtttagaactttttttggtcacattggagaagccttccgtagtctgcgccggaatggctggatgacggtcgccgcgattgcggcagtggccatcaccctctttttggtgggatccttgcttgcctctgtcttaaacttgaacaagttggccagtgatattgaagatgatgtgaatatccgagtgtcaattgacctggcggctgaccaagacgaccaggaggctttgtgggataagatcatggctttggataatgtggcagacatgacctactctagtcgccatgaagagttggacaacattattggagtttacggtgaggactttgacctcttagaaggggatgacaacccgctttatgatgtttttatagtccacgcaactagtcctgaagccacccaggccttggctggtgaaatcgaagactttaactttgtccaagatgttaattatggaggcgctgaagctgaccgactcttcagcttgacccggaccatgcggaatgtaggttttgtggttatcggcgttttaatctttacagccgtctttttaatatccaacaccattcggattgccattttctcccgcagtacggaaattgaaatcatgcgcctagtcggggctaaaaactccttcattcgctggcccttcctgtttgaaggtgccattatcggtttagtggggtccctaatttcatcagctgtcattgcctatatttacattaacggctttgaccgcttgatgaccctcttgtcgcaaaccagctttgccctcttagcacccgaccccttcttgtatggcctacttggggtcttggttgctatcggtgtggtgattggcagtcttggttcattactatccatccgccgtttcttaaaaatttaaaagttaagattaaaagctaggaaattcaaaaagagtttcctggcttttttatagtgatgcttttccactggccagggttatttttggacacctaagactatgaatgttccaactttggattcttcattgccagacaggatcattttttgtttaaagaataatacaagaatgtatagcttatgttaagagtgatagcttttcgtaaaaagtgtgttactatatggttgattaaactaatcattaaccaagttatgcttaggctgagttgggattggcctgacccagactggttaatgtaaaagttagaggacaaggaagggatatatgatgaagaaagttttaataattgaagatgaaagctcaattgctaaactcttaagttacaatattgagcaggaaggctttgcaacggaaaccgccctagatggtcgggaaggctaccaactagccttagccaatgatttcgacatgattatcttggacttgatgctcccatccatggatgggattgatgtttgccggcagttgcgtggggagaaggttgacacacccattatcatgctgacagccaaagattcggaagtggataaaataataggcttggagatcggggctgatgactatatgaccaagccctttagtcccagagaagtcattgcccggatgaaggctgtctttagacggtatgacaaggcagttgaatctgacaataccactagccaggtctctgctaataaactgattacagtcggggatattgagattaacccggtcgaatttaaggttcgggttaaaggccaagaaatcctcctaacccctaaagaatttgacctcctactttatctagccaaacgtcaaagccggattttaagccgggagcaactccttaatgctatttggaattacgattttacaggggaaactcggattgtcgatgttcacattagccacctccgtgaaaaaatagaggaagataccaaaaatccccaatacattaaaacggctagaggctttggctacaaattcgaggcccctagatgaaacagttaagaaaaagaatggtgggctactttgtcctggttaacaccatcttgtccattgctctcttggtttcctttgcctttttggctcaccggcagtttaccaaccaacaagaagagatgatccagggtcaaatgcaggtcctagttgatagcattgaccggaatccaactgccaaagagtcggagagggacttacaagaccagattgaagcagtgtcggactactttcaggagcgtatatccctgatggatgcagatggccaggtcctctttgatacagaggtcgatgaaaaccaggctgaaaaccatgctaatcgggaagaatttatggaggctgtccagtccggccaaattgaaacggcaagccggcaaagcatgtccaccgaccagtccatgtactatgccgctcaagcaatcacggaccaagagggtaacttgctgggagttgttcggatatccaataccgtcgataacttaaaccaaattgtggttttcctatctagtttactagccatttccttattgatccttattttgattactatctttatgacctattattggaccaacaagattggcaagcccattgatgaaatcaagtctgtcacccatgaattagccaataagaattacgaggcccgctacaccttgtcttcttattccgatatcaacgaattaggggactccatcaatgacctagccgaaaaccttaaagcccagttcaatgccatcaagcacaatgaccagcaactgaccaaactgttagaaaacttagtggtcggggtcatcttgattaatgaaaatcgggaaattacggtttgcaaccccatggccaatgaaattttaggggtcaatatttatggcaatattggccgggtctacagtgatattatccatagttcggatattatccaattggtggagaaggctatccggaaaaatagggcccaaaataaagaaattatcctttacttacaaaacgaaaaaacactagacgtaaatgttgtcccgattagggaagaagaagaaaagaatgattatgtccttctcttttacgatattactgaaatcaaacgactagaacaggttcggactgactttgtagctaatgcctctcatgaactccggacccctattacggctttaaaaggattcagtgagaccctactggacggggctatggaggatagagatcttttagtcgaatttctagagattatgctcaaagaatctactcgtttggattccatggtccaagatattttgcaattatcccggctagagcaaagaccaagccagcaaggggtgagtccagttgccgtcgaccaggttattgccgatgtcatgcaggttttacagcaaaaagctgaaagtaagcagattagcttgaacctacatgtcaaagacaaggttcaagttttagtcaaccaagacgagctgaagcaggtggcgatgaacttgattggcaatgctattacctataccccagaacaaggtcatgtggaaacagaaatttatcaagaaaacaatgaggctgttattaaaatagcggatgatgggattggtattccagagaaagaccaggctaggatatttgagcgcttctaccgggtggacaaggcaagaagccgaaatgctggtgggacaggtctaggtctatccattgttaaatggctagtcgagggtatggaaggccggatccaagtggaaagtcaactaggccaagggtcagccttctacctttacctccccttttaccaagatgagaaagacccggacatgtcaggcatcaaactaagctagtcattaaaatttacattatctttacattcctttacacagtctatacactaacttgatttactatcaacaattcttcagtattatagggagtaaggacagaatggtccatcaaaattcaattttgaaggagagttatgacgtatgactttgaaaaaagcaacaaaatggatgtcagtactcagtgtttcgctaattttagcggcatgtgaccaagaagcgcaagacgaagcgcaagacgaccaaactgaagaagctgctcctgctgacgacgctggcgaagaatctagtgacgaccaagcaggtgaagaagaaggcggcgacgaagaagctgatggtgaagaagaagctggcgaccaagcagccggtgactttgactactcaagcacacttaacgcttcaactcgtgaagatgggtccggtactcgttcagcctttgttgaaatcgttggactagaagatgaagatggtaatgaccaaattgaccaatccatcacagtccaagatggtacgaacgctgtcatcaccggtgtacaagaagacctttacgctcttggctacgtttccgttggtgctattcaaggtaacgacgacgtgaaggccttacaagttgaaggagttgaaccaactccagaaaacatcaaagctggtgactacgaaattgctcgtgacttcaaccttgtatacggagaagatctttccgaacaagcacaagacttcctagactttgtattatctgctgaaggacaagcagttgttgaggaaaacggtgaagttcctgtggacgatggagcagaagaatttactggtggcgacgtttcaggtgaagttcaaattaacggatcaacctctgttacacctctaattgaaaaattaactgaagaatacaatgctgtgaaccctgatgttacttttgacattgcttctactggttcaagcgctggtgttacagctgctattgacggtactgctgatattggtatgtcttctcgtgacattactgaagaagaagaagctgaccttggtggcgtagaatccattgccattgacggtattgctgtcattgtaaacccagaaaacccagttgatgacattacaattgaccagttgcagtcaatttaccttaacgaaaccacaacttgggaagaatttgaataagaagtagtagcctaaaagcatagactacaagataaaagggcttggatggaaacttcaagccccttttattggttaattaatataacgaaagtaacaaaaagaaagggatgaacaaatgaataagccaggtgaaaaggtcatgcaaggcgttttccttgtgtctgcattgatgtccatcattgctttattgactattatttactttatttttgccaacgggcttccgattatgttccgttatggtttttttgactttatttttgggaccgaatggcgtccgtcgaataatccacccatgtatggtctcttaccgatgataacaggttccgtttttgctactcttggagcggctatcttgggtgtcccagttggtgttttaaccgccatctttatggcagagttttgcccagactggctttacaaggtcttgaaaccggctgttaccctgatggcctccattccatccattgtcatgggtttctttgccttgagactattggtcccagctgtccgggaaaacttcggcggaaatggttacagcatgttgtcagccattttaattctttccattatgattttacctaccatcattgaactgtccgaatctgccttgaagactgttccacgtacttactattcagcctccattgccatgggggcttctcatgaacggtcggttatgaacgtcctcgtacctgcagccaaatcaggtgtcttgtcctctgtcgtcttgggtattggccgggcaatcggtgaaaccatggccgttgttcttgtagctggaaaccaaccgattatgccaggtggcttactgcaagggatgagaaccttgaccattaatattgtcttggagatgggctacgctacaggagagcaccgggaagccttgattgcgacagcagttgtcttgtttgtctttatcttcattatcaatggtagcttcctcgtcattaagaataagggggataatcaataatgcaatccaaacatgtgattcgtggaattgtctacttagctgcacttattacctttggtgttctgctttacatcatcggttttatcttaattaatggtatacctgctctaaatttggacatgtttagactgaactataccactgagaacgtgtctatgatgcctgccattattacaaccttgtatactgttatcggtacactgggtatcgcaaccccaattggtgtctttacaggattttacttagttgaatatgccgaccggtccaaccctattgtcaaattgattagtatggcaactgacatgctggcggccgtcccatccattgtctacggtctttttggtttcttgttcttcgtcaccttcctcggcctctctttctctatttcttctggtatcttaacggttaccattatgatcttgcctttgattatccgagcaactgaagaagccctcatgggtgttccaagaggcctgcgtgaagcgagttatggtttgggggctggtaagttaagaaccatctttactgttgttctaccagtggccatgccagggatcctatctggtgtcatcttggccatgggtcgggtggtcggtgaatcagctgccttgatttacaccctagggtcttcaaccaacattccaaccagtttgaccagttcaggccggaccatggctgtccacatgtatgtcctatccagtgaaggccagtatgttaatgaagcttatgcaaccgccgttgtcctctttatcctcgtcttaatcttaaacggtctatcaaccttagtcagtaataaattagctacgggaggcaaataatgtctgaaaaaaatattaaaatgcaagttgaaaacatggatttgtactacggtgatttccaagccttgcactcagtggatttagatgtttacgaaaacgaagtaactgcttttattggcccgtctggttgtgggaaatcaaccctcattaagtccttgaaccggatgaacgacctagttccagactgccgcatcgaaggggatatccgcttagacggcaaggatatctatgctaaggggattgacctgactgaactccggaagcaagttgggatggtcttccaacaccctaaccccttccctaaaagtatctatgacaacattgcttatggtccaagaacccacggcattaaagacaagtctaaattagatgaaattgtcgaaacttctttgaagcaagcggccatttgggacgaggtcaaagaccacttagaccgaaacgctctttccatttctggtggtcagcaacaacggatctgtattgcccgtgcgattgccaatgaacccgatgtctcttgatggacgaaccaaccagtgctttggaccctatctctacttctaaaattgaagacctagtcgaagaattgaaaagacaatacactattgtcatggttactcacaatatgcaacaagcctctcgtgtttctgaccggactgcctttttctaccaaggccggattattgagcaagacgaaactaagacactctttaccaatccaagtgaagaaagaacagaaaattacatttccggtcgatttggttaaagacttgactttcgcctagcatccgctatacttgaatatcagcttatttcctgtataatcaaaaaaactagaaagagggtaaaagatgagagttgcatttgacaaagaactgaatgagttgaatcgatctttttcacaattgggtaacctagttaatgaagccatctataaatcaattaaggccttcatcaaccatgacaagaaattagccaaagaagtgattgaaaacgatgaccgtgtcaaccaactggaagttgaactagaagggaaatgtattgagattatcgccctccaacaaccggtgaccgctgacttgcggaccatcattactattttgaaagcatcagctgacttggaacggatgggcgaccacgccgttaatattgccaaagccactattcggattaaaggatccaaacggtctgaagaaattgaaggtatgattgctgaagctggcgaaaaaattaaagttatgggtcaagatgttcttcaagcctttgtagagatggacaccaaggcagcccttcactttgatgaacgcgacgatgaaatcgatgagataacagataacctgaagcgaaaaagtgtcaaacgggtcgtggatgatcctgaactagcattcggagcgaccgactacaccctagttggttcatccattgagcggattggtgactacatcaccaatattgctgagtggattgtttaccacgaaaccggtaaaatcaaggaattaaatatcagccatgactatgaaaattttgaagagtaagacttggtcatgaagcaagatcaagatggagcaggataggcgactatcctgcttttgtcatatttaaaatttttgccctttacgccaaaacctgctaggaaagataaaattagaaagaagtgatgcccatgggaatgcacgcctattttaaaagcctatcagacctggaaaaaatctaccgttgcccggggaagtttaaatttgaagaacactcggttgccgagcactcctttaaggtgaccaagattgcccagttcttgggtacagttgaagaacaagagggcagggatattaattggcaagtcctctatgaaaaagctctcaaccatgactatgctgaaatctttatcggagatatcaaaaccccggtcaagtatgctgatcccaatcttagacaaagattggctgaagtcgaggagaagatgaccctgcattttatcgccgaagaaattcctgaacgctttcaggaggtttacaaaaaacggttgagagaagctaaggacgacagcttggaaggacaaattttatcggtagcagataaaattgacctcctctatgagtcctttggtgagatccaaaaagggaatccagaagacctttttaccgatatttaccaggaatccttggccaccatcttggagttcaaagacttggtcagcgtccagtactttatcgaagaaatcttgcctgacctacttcagggtgaattcaccaaccaggctaagctgcaagaaatttcagatgccatgctccgggactaatgatggaccggccagcttgacttgaacttgaacgtatgttcttataatatggttatgttataatagggatgtgacagatgaccttgttgcatcctaaaagaggaggagggctagatttttcagccctttttctattgaagcaaagaatataataaagcttacagaatggagcaatttgaatggcaaatgataaaatcgttgtccgtggggctcggtcccataacttaaaaaatatcgatgtcactattccgagagatgagtttgtcgtcgtgaccggcttgtctgggtctggcaaaagttctttagcctttgataccctttatgctgaagggcaaagacggtatgttgagtctctttcggcctatgccagacagtttttaggtcagatggacaaacctgatgtcgatagtatcgacggcctgagtccagccatttctattgaccaaaaaacaaccaacaacaaccctcggtcaaccgttggaacggttacagagattaatgactacttacgactgctttttgctcgggttggccaacccatttgccccaatgatggttaccccatcactagtcaatcggtagaccagatggtagacagcattttagacctacctgaccggactaaaatccaagtcttgtcccctcttgttagaggcaaaaaaggccagcacaaaaaagtcttgagtcaggtcaagtctagcggttatgtcagggtcattgtagatggggatatgcatgatattggcgacgagatcgaattaaataaaaataaaaaacatgatatctcggtcgtagttgaccgaattgtggtcaaagaaggcatccggtcccgcttgtttgactccatggaaacagccctcaagctagcagacggccaggccattgtagacgttatcgatggggaagaaatggtcttttctgagcaccattcatgcccaatctgtggctttacagtgccggatttagaaccccgcttgttttcttttaatgctccttttgggtcctgtcccgactgtgaaggtattgggaccaagttggaggttaacttggacctggtcattccagaccaaaccaagaccttgaaggaaggtgctttggctccttggaatcccatttcttctaattactacccttccatgttggaccagttttgccaagcttttagtattgatatgaacattccctaccaagacttgcctgatcaagataaaaacatggtcttgtatgggtcaggggatgaggaattcacctttgtttaccagaatcagaccggtaaggtaagggagaccaccatgtcctttgaaggggtcgtcaacaatgtctcccgccgttactttgaaacgtccagtaattttacccgccgtgtcatgggagaatacatgacggagaaggtttgcccaagttgccagggtaagcgactcaacccccaagccctcagtgtcaagattgatgaagcggattttggcgaagtcagccggctgtccattgaccaggcgttagacttttttgaccagcttgacctaggagaccaggacagggaaattgcccagcccatctgcaaggaaattaaggaccggctatctttcctaaaaaatgtcggcttggactacttgaccctgtcccgaagcgccggcaccttgtcaggtggggaagcccagcgaatccgcctggccacccaaatcgggtctaacttgtcaggggtcctctatatactggatgaaccatccatcggcctccaccaaagggataacaaccgtttgattgactccctcaaaagcatgcgagacctaggcaataccttgattgtggtagaacacgatgaagatacaatgttagcggctgaccgcttgattgacattggcccaggtgcaggagaccagggcggggaagtcatcgccaacgaccgccccgacctggttgcccaaaaccaaaattctatcaccggccaatacttgtctggcaagaaatttattcccatccccaaaaagcggcggacggctgaccaaggagctattgctgtcagaggggctagggaaaataatttaaaagggatcgatgttgactttcctttgggtcgcttgaacctggttactggtgtatccggttcaggcaagtcttccctggtcaacggtgtcttaaaatctgccttagctagggcagtgggtcggtctaaggaaaggatcggtaaggttgaccaggtgtctggttacgagggaattgacaaggtggttgacattgaccagtcccctattggccggactccccggtcaaacccagctacctacaccagtgtctttgatgacatccgggacctctttgcttccactaatgaagccaaggttcgtggttacaataagggccggttttcctttaatgtgaaaggtggccgttgtgaagcctgcaagggtgacgggattttgaccatcgaaatgcacttcttaccggacgtctacgttccttgtgaggtctgcaaggggactcggtataactccgaaaccctggaagtggaatacaagggaaaaaatatctcccaagtcttggacatgactgtagcggatgcggctgaattttttgaagctattcccaaaattaaacgtaaacttgatactattatcgatgttggcttgggctatattaccctaggccaacctgccccaactctttctggtggcgaggctcagcggatgaagctagcttctgaacttcaaaaacgtcaaaacggccacaacttttatatattggatgaaccaacaactggtcttcataccgacgacattgcccggcttttgaccgtcctccagcgcttagtggatgcaggcaatactgttgtgattattgaacacaacctggacgtgatcaaggtggccgactacattattgacttaggaccagaaggcggtgctggaggtggccaggttatcgcaactgggactcccgaagaaattgcccaggttgaagatagttatactggtcactatctcaaggctatcttagaccgagacttggcccggatgcaggcagctaagaagtaataagattagccctttctttagccaaactttcccaaaaattccataagctttgcataatccagcaaaagagaatcagtcaaaagacctatgacaaagctgtcgttctgttagataataggtctaagtaaagaagccagttaaaagcccaaccaggagggaataaaatgactgaaaaagaccggattattgaacttgttaaagcgggtgtattgacaactaaagaagctttggacttaatcgaaggtttggctcgaaaagaaggggaaaaatccgccaatagagactttgcaagcagtggaagcaaggaagaagctgaagcaggtattgaagcggcggccagtgacatgctggtcaagtcagaacggatcgacagtttaaacgatcaaatccaggaacttgagtctgacttaagcgacttgcaagctgaattagaagaagcagaggcaaaccaggaagaagacctgctaaaaaatttgcgacaagattttaaagacttacatgtcgaaaaagatttgatcaaagacctagatgaagtggataattccaaagaattagaccagattaatgaggaaattaaagacctagaaagccatatccaagaccaggaagttatttcccaagacaagcaggctgaaatcaaggaattaaaaagccagttagtagctttatctaaggaaattgctcgtttggttaaagaacgggacagtttggtcaaagaggttgacggtagcgattcccagtggtttaccgaccagctggaaaatttaaaggaccagttccaattttctgaggactggaaagaagaaaccagtaaaaaggtcaaccaagcgggtgaaaacattaataaggtagtcaaggatatcgtaggcagttccaaggactttttggaccattttgaatggcataaaccagacctcagagtcttcaaccttgtttccaactcttttaacaaggagtggcaaattgaggatagccagccaactatttttgatattaaaaatgccaatggagacctagtgatccaagaaggtccggtagcgcatatcgagataaaagcctctatcaccatgtttggtaaatttaacagctcactagaagaggcctttgaaaaacggtcgacctaccggctgacagaagattccttgaaactacacatccccaacaaaagggtccaggctgatattcaaatcacccttcccgaaggcagttatgactacttgtcagtcaatgttttaaatggagacctaagcttgaaggacttaacctttagtgacctctaccttaaagcaactaagggggacattagcctagaccaagttaaggcctctatggtggaggtcaaggggacatctggggacatcaaggtcttggatagcgacttgcaagacttaatcatttcctctgttaatggggatatcaaggcggatggccggcttgcttcctccagcttggcaacaactcttggtgatatacgcctaagtttgtacggtccaagtccagtccaggtggatacctccactgtttatggggatgttaaaattgcccttcccctagataaagacttagaggtagaaggcaagtccaactttggtaaagtctacagccggctcagccaaaccaagatagaagccagtgacggcaaggactcctctgtcacccttagccggcttggtcagggagaggccatccgggtcaaggccaaaacaacccaaggaaacattttgctaaaagattctgaataagtcagagacaaggctcgggtctggttgcttgagtaagaaagctccttcctttttgaaggaggagccccccaccttgcctggccagacaagaaagggtatctatcgtgaataagttgcaaaggtctcaagctgataaagtcctctttggccttttaggaggagagggagaatacttgcttattaatcccaacctagtccgcctgattttctttattttggcaattctgacaaatggtgcatttttcgttctttagtttatcttacatggccttttacctgatgggaaagaagaagtttaagataataaataattgagaacccgcctcttgtttgagggtaaattcatatggaagggtggtaggtgtgaaaaagttacaaaaatcaaaagataatgaaatcctctttggtgttttaggaggtattgcggaatactttgaaattgaccccgtcttagttcgtgtgattttcttcgtcttggctgttggatccatggggacctttatcgtgatctacattgccttggccatcatcatgccagatgaacccgaagaagtcacctttcggaaaagaagggaaaaaattcgacaagaatttgacaaggtcaatagaagagactatagaaatagggaacgaaaacaagctgaagatgtggaagaagtagacgaagatgattggagtgatttttagtgaaatggtggcagaggattctcttgaacacaatcatgtttttggccttggctggcttttttaagggctttgttatagactctatctttacagccctcttagccgctgtcatttttggcattttaaataccctggtcaagccgatcttagtccttctttccctgccgataacggtcttaaccctgggcatcttttatttcctgatcaatggcttgattttatacatgacgtctgccttggtgtccgggtttacaatttcatcttatggcttggccttccttctttccttaatcatatccctagtcaattcctactttacccggcctgtctactattattagggccaggacttgattggtgcgaagctttaaaattgctccggcgacagcaaatggaccagctttataagcctggttgagccggagctttttgctttgctggcttggactggaagggccagggaagagattgagtcggttttgaaccaggcctggaattagccccatgtaaaatgacctcacatgtggtaagataggatggactatagctttcttttacttggaggaaggaacaatgactaaatttgtgacagtgggggacctggtggaaggtgttaatgcagccagggtgatctcaggccaagactttttagacaggaagattaagatcacagatgtttcaagaccggccttagaactgacaggctactttaactattatgccaatgaaagggttcaggtcttgggtcggaccgagatatcttttatggcgagaatgtcacctgaagagcggaaaatcatctgcaaacgtttgtcaaccgaccagaccccttgctacttggtttccagggacttagagccgcctgaagaattagtagaagttgcgaatagccaaggaattcctatcttaggaagttataagccgactacccggatcatggctaatatgactaattatttagagaaaaagttggctgaccgcatgtcccagcacggtgttttagtggacgtttacgggatggggaccttgatcattggtgattccggtattggcaagtcagaaacagccttggaattggtcaaacggggccaccgcctcatagcagatgaccgggtagacttgtacatgcttgacgaaagtcggattgttggcgagccacctgaaatcttgcggaatttaattgaaatccggggcatcggggtgattgatgtcgtcaacttgtttggtcttggtgcgattcgtccccgcaagaaggtagacttggtcattaacctggaaccttggaatgaggaccggcattatgaccgaattggggatagtatggagaagatgaaattcttcaatgtggatgtccccatggtaactgtcccagtccgggttgggcggaacttgtctattatcattgaaatagccgccatgaaccagcgggctaagaacctgggttatgatgccgttgaaaccttccagcaaaacctaactgaattaatgaaacggaattccactgacctatagacctagcccgattatttaaaaagccagttcagtcaattgattgttgaaagagaaaaggagaccctatgcaggaattgttagctgttattgatcccatcgcatttgaattaggccctatatcagtggcatggtacggggtgattatagccttggccatgctcctagctgtctttttggcctctcgagaagccaaaaaattgggcatggatagtgatatagttattgacttagccttttggattatcccctttggcattatcggagcccggatttattatgtcttatttgaattggattcttatatccaagaccccatccggatcctctttatatgggaagggggcctggccatctatggggggattattgcgggcttctttaccattctatggtttgcccataaggaaaaactagacatttggctcctctttgacctagcagccccatccttgttgatagcccaatccattggccgttggggtaactttgttaaccaggaggcctttgggggcgaagtttcccggggatttttggaaagcttatatctacctgaatttatcatagagggaatgaacattaatggggcctaccaccatcctaccttcctttatgaatctatcctaaccctagccggctttatcatcgcccttatcctgcgccggaaagggaatttattgcggggggaattgatttccttctaccttatttggtacggaactggccgcttctttattgaaggaatgcgaacagacagcctctacattggtcccctccgtgtcagccaagttttgtcagccctcatcgttctccttggaattgggataatcctctatcgtcgcttttacctttaccctagaccgccatactacagtgaaggagttaaaccagaaattgactttgccaagaaaaaagcagcctacgaccaatagggggtgatttgtgtgattaaccaagctcaaccagaaaaagtaaccgtcttgggtgccggctcttggggaacagccctggccaatgttttgatcgaaaatggccatgatgtattactctggacccggagctctgaccaggcccaggagatcaaccaagaaaagactaaccaccattatctcaaagatactcacttacctgattcgattcgagcgaccagtgacttaactgaggcagtcggccatagtgacattttattatttgttgtccccacttcagctatccgaccagtagcccgagacctggctggcttactgactaaagaagtcagcgttatccatgcagctaagggtttggaagggggcagttacttgcggatttcccagattttagcccaggagttgcccgctgacttggttaaaggcattgttgccttgtcaggtcccagccatgctgaagaagtggtcaagcatgacttgacttctattacggcagccagtgaaaacccagaccaggcgagatttacccaaaaactctttatcaatgactacttcagggtctacaccaacccggatattatcggagtagagattggggcagcccttaaaaatattattgctttagggtctggcatcatcgatggttacggctatggggataatgcccgggccggtttgataacccgtggcctggccgaaatttcccgtctgggccaagccattggggcccaagccctaacctttattggcttaagtggggtaggggacttaatcgtcacctgctccagcccccattcaagaaattaccaggctggtcgcctgctaggccaaggtcaagacttagagtcagccttggactcgatcggcatggtggtcgaaggggtctacaccacccaggccgcctatgacctatcccaaaaaatggggatcgaaatgcccatcacagaagccatttaccagattttatatgatgacttgtcagttggccaagccattacttcattaatgaaccgcaggggtaaatcagaagcttaactttttgcttgtctgacctttgacgcgtatcataatggttgagtaggagtatttgaccaggaaggaggattggatggcacaagcaaaggataagattatccgtatcaacccatcagcacccttttactttgagcgagcctttgatgcctaccaccagtccgatttagacaaaggaattaagtattttaaaagagggatcagcctagctgacaacccctatgaagaacattacggggccatccagcttgccttaatttaccagcaccagggagaattccaaaagtcttacgacctggtccaggacttgcttgacaaaagtggcaagctacaagctgacctctattattaccaagctgtgaattgttcctatttaaaagattaccgggaagccaagcagcacttagagacttttatcaatttattggaccaaagaccaggccaggattccccttaccggagtgaagcagaagacatgcttgtttacttggcaaacttggattagtctttcagtccaataaagttaaccatgaacctgtctatgaggaaaatgaatgaaggagtcgaagatcgagaatggattcagaaaatatctatgatgttgttgttgctggatcaggacctggtggcatgactgcggccctttatgcttcaagagctaatatgactaccttgatccttgaaagaggagcaccaggaggccagttaatcaatacggctgaaattgaaaattacactggatacaagtcgattccaggaccagacctggctagcaagatgtatgaaggcgccctcaattttggggccgactaccaatatggggatatacaagacctgatcgaccatggttcctacaaggaaattaaggcttcaggcaagtcttattttgccagagcggtcattattgcaaccggtgctgagcataaaaaattaggggtccctggtgaagaaagctttaacggccggggggtttcctactgtgccgtttgtgacggagcctttttcaagggcaaggatattgttgtagtcggcggaggagactctgcggttgaagaagggaactaccttacccaatttgccgaccaagtctctattatccaccgccgggatgaattgcgggcccaaaaagtcttgcaagaccgggccttcaacaatgacaagattgattttatttgggactctgtggtcgaagaaatcatgggagatgacagtgtgtctaaggtccgcctccgtaatgtcaagactggagaagttagtgaattagacaccaatgggacctttatctacattggcctagtccctaacagccaagcttttgctgggctaggtatttgtgacgaccaaggctgggtcattacgaacgaaaaaatggaaagcaaggtcccaggtatctttgccatcggggatgtccggcaaactgtcttgcgccaagtagccactgcagtaggcgacggggcagttgctggcaatgaagcctttaattatgtagaggaatttaaggattccttgaccaaagaaaaaattagccaaagtatcaaggaaagtgaatagtccaaaaaaattgttattcgcaagcaagggcctggctccagaaaataggtcgggtcaggccagttgacttgctctttatagaaaagatgggaggatataaatgacttggaaggatacatatcaaagctggctgtcttttgaccagctagacgcagacctaaaagcagacctagaccagttagaagatgactcagaccaactagaggacgccttttataaggccttggaatttggaactgctggcatgcggggcttgatggggccagggaccaaccggatgaacatttacactgtccgtcaagccagccaggggttaagtaactacttgctcgaccgcttcgacgatgccaagcaaaggggtgtagcaatcggctatgactcccgtcaccagtcccaagcctttgcttttgaggcagccaagaccttggggcagtcggggattaaaagttatgtctttgaatcgatttgccccacccctgaactttcctttgcggtccgtcattttaaatgccgggctgggatcatggtgaccgctagccacaacccaccggcctataatggttacaaggtttatggcgatgacggtggccagctcctccctcaagcagcagaccagttaacagattttgtcaaccaggtccaagaccccttgtcagtccaagtagcccaaaaggataaattaatccaggctggcctcctcaatatagtagggcctagagtcgacaagtcttacctggaaatgatgcagtcagtcacactcaaccctgatatggttgaagattatgccaatgacttgaccatcgtctacaccccccttcatggtacagggcaaaaattggtcaagaaagccctctacaatgccggcttccaaaatgtttatgatgttgacagtcaaaaagacccagacccagacttttcgacggtggaaagccccaaccccgaaacagagggggcctttgccgaagcaataaaggtggggaccaagcaggatgcagatgttttgatcgcttctgaccctgatgctgaccgcctaggtgtagccgtcaaaacagttaaagggtcttaccgggtcttgtctggtaatgagatcggtagtctcctgacccactatattttaaaagcccaattccacaacaaactcctacctaaataccccgtcgtgattaagtccattgtgtcttcagacttgccagaccgaattgcagactcctttggggctagggtagagactgttttaacgggctttaagtatatagctgaccggatcaagttccataatgagtctgatgagaccagctttatgtttggttttgaagaaagtaatggctacttgtcccgctcctttgtcagagacaaggatgcggtccaagccagtgtattagtggcagaaatggccctttattataaattgcaagatttttcactggtggatgccctcttcaacctctacaaccactatggccactttaaagatacggttttttccctcagtttagaagggaagaaggggcaagacaagattgaccagatcatggaaaaattccggcaaattccgctgaaggactttgcaggctttaaagtcaaggctaaggaagattatctatctagccaaagaagcttggctgaaggtggcacagaagatattgacctgcctcagtccaatgtgttgaagttccaaatgacagatgggtcatggctagcagtccgaccttctgggaccgaacccaagattaagtgttacttatctgctacggatgggtcgaagttagaagtggaccgcaaattagaacgcttagagcaggcagcccggcaattgatggattaaagagttaactttgcttaaggggtgccggtttaagtatgaagccaatgatggtcaaggcgatgattgactagaaaggagacacttatgggtgaacaaatagaagtagtcatcattacaggaatgagcggggctggcaagacggttgcggtccaatgcctggaagacttgggttattattgtattgataatatgccccctgagctcctgcccaccttttgggacttgacccggaaatcggcccagcttaccaaggtggccttggtcatggacctcaggatgcgagatttcttttcccatatgaaggattccctggctaaaattgaaaacaccccctatattgtcaagcggatggtctttttggactgcagtgatgaagaattaatcaaccgctataaggaatcgcgccggtcccaccccctagcttatgatgaccgcttgattgaggggatcaaaaaagaacgtcagtctttggccagttttcgccagcaatctcaagtggtgatcgacaccagtgatttgacccctagacaattacgggaaaaatttgtaaaattgtttgggcagtctgccgaaaataaattgttccgggttgagctggtctcctttggctttaagtacggcatcccaacagatgctgatatagtcatggatgtccgctttttgcccaacccccactacctacctgaattgaaagaccagactggcctagatgaatcggtctatgattacgtcatgcaacaaccggaaacagaacagtttttccaaaaatttatcgacctattgacctttaaccttcctggctataaaaaggaagggaaaaccagcctaacagtggctattggttgtactggggggcggcaccggtctgtagctttgaccgaacgcgttgccaaaactttgtctggcgacggttatgacgtgaatgtatctcaccgcgacaaggataaagacaaggagtccgtaattcgatcatgaccatttccagaagacccaaaattgtgatgatcggtggtggcactggcctccccgttatcttaaaaaacctaaaaaagttaaaagcagacttgacagcgattgttacggttgccgatgatggtggcagcagtggtcgcttgcgggaagtgtttgaagccatcccgccaggggatatccgcaatattttagtcgctttgagtgatattccccaaattcaaaaggatattttccagtaccgctttcagtcagacgaccccatgtttggggggcatgctatcggtaacttgattatccaagctgtgtcagagatgaaaggcgatatcaatgaagctatccaggttttagctgacatgatgaaggtggagggtcatatttatccagcttctgacaagcccttggtcctccatgcccgctacaaggatggcagcttagcttctggtgagtccaagattccgatctctggtaagttaattgactatgtggctgtttcttctcttgacactgaccacggaccggtggaatgtggtagtcatgtcaaggaagccattatggcagctgatgccgtggttctagggcctggatccctttataccagcattttgcccaacctgatgattccagacctaggggaagcagttttgaaaacgtcggccaaggttatttatatttgcaatattatgacccaactaggtgaaacggaaggctttaccgatgcccagcacgttgaagtcctctaccaccaccttaaccaaaactttatcgacacagccttgatcaacaatgctcaggtaccatcagattatatcagcatggaagggtcagaaattttataccaggttcaacacgattttaatggtttaagccaagctgttccccatgtgatttcagatgatttcctggacttgtcagctggtggagtctaccacaatggggccaaggcagccaaggaaatcttcaatatcgccaccagtaataagaaccagaccgtttaatagaggagggttaacatgtcttttgcaggtgatgttaaaaaagaattaaccatgctggaagtccatcccgaacatgcaaaagctgaattagccgccttgattcggatgaacgggactttgggtctggttgaccgggaattctatttgaatgtccaaactgaaaatgcagctattgcccggcggatttttagcctgattaaagatacttttaatgtccaggctgaattatcagtccgtaaaaaaatgaagttgaagaaaaataacgtctacattgtccggctcagaagtggtagccagaccatcttgtccgaattgggcatcctaaagggcatgctctattcaggatctgttccagaagagtacaagactaatgaacaaaaaatgcggtcctatctcaggggagcttttttggctggcgggtcggttaatagcccagggaccagccgttatcacttggagattcactcggtttacgaagagcataacaatgatatttatgacatgtttgactatttttcactaaaccccaaaaagcacgagcgtaaaagtgggggctacattgtctacctgaaaaaatctgaaaagatagctgactttatggccgtcattggggccactaacagcatgttccaatttgaagatgttcggattgtccgggacatgcggaattcggtcaaccgcctggtcaattgcgaaactgccaacctaaacaagaccatttcagcggccagcaagcaaattgatagcatccagttgatcgaccaagaaatcggcttggatgacctgcccaaaaaactctttgaagtggccataacccggttgaaacaccccgatgtttccttaaaagaattgggtgaattggtgccgtcgggtccgatttctaaaagtggagtcaaccaccgcttgcgtaaaatcaaccagttggcggatgaactccggtcttaatcaaacaacctgactctttgagggtcaggtttttgatttttcactattaatattgctagttttatataatagccgttctattttggggcaacttttgaagttatcgtttttaatggaggggttttgagctagggatagccgggtctaatccatgatgagaaaagagagaggacagggacagactgttttctgttgttggagaatgaaaaacgacaatgggttggccattcggtactttgaaagttgaaaggcgacaatgggagagccatacggtactttcggatttgaaacgcgacaataattcagaattgggaagttttggatttgaaacgcgacaattgctgagcgataaaggagttctggtgcaataacgcgacaattgctgagcaataaaggggttctggagcaagaacgcgacaatcggtgagcaataaaggagttctggagcaagaacgcgacaatcggtgagcaataaaggagttctggagtaagaacgcgacaatcgctgagcgataaacgagttatagagcggaaacgcgacaatcgctaagcaataaacgagttatagagcaagaacgcgacaatcgctgagcaataaacgagttatggaccaacaacccgacaatagctagttaaccaaagagttactaacttaaagggtgacgaataactataaaaaaagaccctggtgaaagtttcaccagggttaaattgcatgcaattataataattagttttggaagacttggcctagctagcaagatagaccatttgttctggctggggcaacccacaatcctagttcagctggtaattgccactgagctggattaagttaaaataagttgaattatcaaaaatcgcaaagcggtctgcttggtccaataagtcatctaacaaatcttggcaataaaattgcttggcttggagttctgcccctgtgaagggtgaccggccttttcggctactcagacggtcatgaataatttcacctgattccacttcaatagcatagattgagaccaggtagtctttttctttggctaacttgcaaatcggaaccaggtcgaagtcgtcagtagtcaaccgggcttcgatggtgagagggaacttgaggtcaaagcatgtctggcaaaacttgtataatgaatggtggttcttttggacaaagtaagtgtgactaaataagtcgagggcagtggcccggaagatagacttccccaccccatcgactccgataatcaagttgatttcccgtcttcgttttcggtctccgtccacgtttgcctgcttaatgggagtcgggtcatcagccataaggatctttttttgtctggtcgacaaatggaagttaactaggctggctaaaaactcacggtcactcgagtcattgctgaggaaaatcccattgaaaagctctagcagaggaaccttagccaaattatccttagtttttagcagttcttggatgcggttggttaccatagcttgtacccttctttcttcgttcattatactggataccacttcaataaggaatataaaatgaaagcttggcttttaatcagggtgaaaaagtcaaaagaaaaagtttgactttaattgaccattgggttatattaggtatgaattaaatattatcgatctctaggaggaatagtaatgaatttagttcccacagttattgaacagtcaccaaaaggcgaacgtgcctatgatatttactcaagattattaaaagaccgaattattattctaggcgatgccattgacaataatgtagctaactcagttgtttcccaacttttattcttagatgcccaagattcagataaagatatctacctttatgtcaactcccctggtggcagtgtcacagcaggtcttgccatctatgataccatgaactttattaaagctgatgtccaaactatcgtcattggtctagcagcttccatggggtctgtcttggcaacagcaggggctaagggcaaacgttttgccttgcctaactcagaaatcatgatccaccaacccctaggtggggctcaaggtcaggcaactgaaatcgaaatcgcagctaaaaatatccttcgaacccgtgaaagattgaacaaaattttagctgaagcaactggtcaagacttagaaaccattgaccgggataccgaccgagactactttatgactgctgaagaagccttagaatatggcttaattgatgatatcatggaaacaagtgacaaactatcctaatgtaacaggataagtgactgaaagaggcaagttgaccttgcctctttttttataaggatttggacaaaaaacgtcccggtataaaagttattgggcttgaaaacgttccggtgccatggtatagtaataatgaagtgaggagcgaattgaaatgttgtcattgatcgaagagcttgtaccgggaacatttcaagtcattgttcagcggtatcagatacttaaggaagttgaaagtcaaagcccaatcggtcgccgggccctagccaaacaggtagacctgtctgagcgaagcttgcggacagaaattcaagttctcaaagaccaggcttttatttcaacttcatctgctggtatgtctttgaccactttaggaatccggatcttggatgacctagaagacctagtcaaggaccaggccagtttccgtgaatcagaagacgccctcgctaagcaattagagataagccagtgcatcatttgtcgcagggacagtcaagagagcctggcgcaggaggcattggcagtcatggaccgcctcctgcctcatgggagccagaccattgcagttatgggagggacgaccatgcggaagttggcagagtcctttgatgaatccctgtcaaccaaccgaaccctccaattcctacccgctcgaggcggggcaggagaagagcaaaccatccaggccaatgctatcgcggatttgatggctaaccggacccatggaaccagtcgacttctctatgccccagaccatgtcagaagcgaaacccggaatttacttttacaggagcctgagattaaggaaaccatgaggcggttgagccaggctgacttagcagtttttgggattggggatgccaaaaaaatggctaaccgaatcggattagaccaagccaccattaaccagttagataaggctggtgccgtggctgaagcctttggtgaatttattgatgctaagggtgagattgtttataagttagctcggattggcttatcttcagaagatattcaagccattcccaacctcctagcggtagcgggtggggctggcaaggcgcaagctattgacgcctactgcaaggtggcacccagccatactattttagtgaccgaccaagcagcagcaaataagattttaaattgggagtcatcccattaaaataaaaatttagattttctaaggaggaaatcatttatgtcagtaaaagtagcaattaacggttttggacgtatcggtcgtttatcccttcgtcgtattttagaagtagattcagacctagaagttgttgccatcaacgatttgacagacaacgatgatctagcttacctcttgaaatacgatacagctcaaggacgcttcccttactctgtagaagttaaagaaggtgcccttgttgtcgatgggaaagaaattaaagcctacgacgaaaaagaccctgaaaaattaccttggggcgacctcggtgtggacgttgtgctagaagctactggtgttttcaacaaccaagaaaaagctggcaaacaccttcaagcaggagctaaaaaagtcgttattacagcacctgccaaagacactgacactaaaactgttgtttatggggttaaccaagatattctggatgcggacgacaaagttatttcagctgcatcttgtaccactaactgcctagctccagtcgttaaagtcctaaatgatgaatacggcttgaacagtggtttgatgtccactatccacgcttacactgctacccagtctcttcaagatgcacctggtggacgtaaaagccgggctggtgcttccaacgcgattccagcatcaactggagctgctaaagcagtgggtaaagttatccctgaagttgacggtaaaattgacggcactgctgtccgtatcccaaccattacaggatcaatgactgaagtttacgttaccttagacaaagaagtaaccgctgatgaagtgaatgcggcaatgaaagctgcaagcagcgatgcatttgaatacaatgaagatgaaattgtttcatctgatattatcggtgacccagctggctcaattttcgatgccactcaaactaaggtaatcgatggcgcaaacggccaattggttaaagtagttgcttggtacgacaatgaatacggctttaccggtaaccttatccgtacactagaacacctggtatctttataacatctgtcaacccactataaagaaagaaaccgagtgagacaagcggggaagcaaacgcgcttccccgcttttttaagagagggtcggctacttcctaccggcccggtctcttacatatcatgaaaggttgtgtaatctactatggctaagcaaattgttaaagatttagatgtaaaagacaaaaaagtcctcgtccgggtcgatttcaacgttcccatgaaagatggcgagatcaccaacgacaaccggattcaggcatcattagagaccattaattacttgatcgaccagggtgctaaattggttcttttctcccacctgggccgggtcaaaagtgaagaagataaggccaaaaactcccttcgaccagttgctgaccgtctaagcgatttgctaggtaagccagtgacctttatcccagaaacccggggtccaaaattagaagaggcggttgacaagcttgaagccggccaagttctattagtggaaaacacccggttcgaagacttggatggtaagaaggaaagtaaaaatgatccagaacttggtaaatattgggctagcttaggtgacctctatgtcaatgatgctttcggaactgcccaccggtctcatgcttccaatgtggggattgcttctcacttggattctgcagttggcttcctcatcgaaaaagaaattgattttatcggtggtgctgttgacaatccagaaagaccttttgtagccatactgggtggtgccaaggtatctgacaagatcggggttatcgaaaacctcataggcaaggctgacaaggtcttaatcggcggtggcatggcctacactttcttcaaagcccaagggaaagacatcggcgactccctcttagaagaggacaaggtcgacttggctaaagacctactagaccgagcaggggacaagttggtcttacctgttgacacagttgccggcaaggactttgacaatgagacagaaagccaggtctttgaaggcaaaattgaaccgggctaccaaggcttagacattggtccgaaaactgttgaccttttcactgatgaactccaggatgccaagacggtggtttggaacggaccgctcggcgtctttgaaatggccaactttgctaaagggactgaacaaatttgtgaagtcctagccaaaatcccagcaaccactattatcggtggtggcgactcagcgacagctgccagcgacttaggctttgccgatgactttgaccacatttcaactggtggtggagctagcttgcaataccttgaaggcaaagaattaccaggcattgcagcaatttcggacaagtaagacagaagttaagaaaggtttgatcattgatgcgtaaacctattattgcaggaaattggaagatgaacaaaacggcgccagaagtccaatcttttgttgaaaccatcaagggcaagttgcccaagccagaccaggttgaagctgtgattggggcacctaacatttttacccagtcattagtagatttaacagctgatttggatgtgaaagtggcagctcaaaatgcctactatgaagattctgggtctttcacaggggaaacttcccccttggccctcgctgacctggggactgactatgtgattatcggtcactctgaacgccgggatatttttggcgaaagcgaccaggacgtgaacaaaaaggccaaggctattttcaggaataatatgctccctattatttgcttaggggagtcactggagaccaaagaagcaggccagacaagtgactttgtggccggtcaagtcaaggctgccttggaaggacttgacggagaccaggttcaaaatctcgttctggcatacgagccaatttgggcgattggaactgggaaaacagccagcccacaagaagctaatgaaaccattaaagtagtccgccaaactgtagctgacctctatagccaagaagtcgctgaccaagtccggatccaatacggtggatctgtcaagccagacaatattgctgacttcctagcgacttctgatattgatggggccttagtgggcggtgctagtttagaagctgaatcattcttgcaattattaggagcggttcaataatgacaaaaaaaccagttgcaattatcatcttagatggccttggttggcgggaagaaaccgaccataatgcagtagcccaagctaaaaaaaccaactttgaccgctactgggaccaattccctcatgctactatgcaggcatctggccaagctgttggcctaccagaagggcaaatgggtaactcagaagtaggtcataccaatattggggctggccgggttgtctaccaaagtattacccgaattgataagtcaatagaagaaggggaattgtccagtaacccagccttccaagatgcaatcgaccatgccaaaagcaagcactcagcccttcactttatgggcttggtatctgatggtggcgttcactcccaccaacgccacctcctcgccctcttggaagaggctaaaaaacagggagtggacaaggtctatgttcacgcctttacagacggtcgtgacgtggcaccggattctgcttctggatttattgctgacttaaaccaagccttaaaagatcaggacttgggccgtcttgcaagcatcagtggccgtttttatgctatggaccgagataaccgctggccaagaatcaaaaaagcctatgatgctatccgctatggccaaggtcaccaagcccaagaccctgttcaagccattcaaaactcttatgctgatgatgttatggatgaatttattgaaccaattgtgttaacagacgaccaaggtcaagcaattggtccattatccgaccaagacagcgtagtcttctttaacttccggcctgaccgggcaattcaactgtcccgggccttgtctgagcctggctttgacgaatttgacctgggtcaagccttagaagatgtcaagctgaccaccatgactcagtatacggaagacatgaatgcccaagtgatgtaccctcctgtcaagcttaaaaatgtgattggagaagttttagctgaccacggattaagccaacttcggattgctgaaacagaaaaatacccccacgtcaccttctttatgaacggtggggacaacaaggaatatcctggcgaaagtcggacccttatcccatccccaaaagtggaaacctatgacttgaaaccagagatgagcgcttatgaagtggctgattccctagtagctgacttggacgaggacaaatacgatgccgtcattcttaacttcgccaacccagacatggtgggccactctggtaagttagatcctaccatcaaggctgttgaagcagtagacgaaaacttgggccgtgtagtagacaagattctagaaaaagatggggcagccatcatctttgctgaccatggcaatgctgacacccttcaaactccagaaggcaacccccatactgcccacaccactgttccggtcccattgattgtaaccaagtcaggtgtcaaattgcgacaggatggcaagttggccgatgtggcacctaccatgcttgaattgcttggcattgatcaaccagaagaaatgaccggccgatctttaattgatcataactaaagtcaatttttttagaaaaaatagtaaaactctataaaggagagaaaaccatgccaaatattattgatcttcatgctagagaagtcttggactcacgagggaatccaactgtagaagtcgaagtcgttactgaatcaggggcctttggtcgaggaattgtgccttcaggtgcttcaactggtgaacacgaagcggttgaattacgagatggggaccaagaccgttactcgggtaaaggagtccaaaaagcagttgacaatgtgaacaatgtcatcgctgacgaaattattggttttgacgtcagagaccaattggccatcgaccaaaccttaatcgacttggacggaactgataacaagggcaaattaggggccaatgccatcttgggtgtttccattgcggtggcccgggctgctgctgaatttgtcggccttcccctctaccgctacctcggtggctttaacggtaaagttttgccaaccccaatgatgaacatcatcaacggtgggtctcactccagtgccccaattgccttccaggaatttatgattttaccaactggagcgcctactttcaaagaagcacttcgctggggtgctgaaattttccatgcccttaagtccatcttgaaagaccggggattggaaacctcagtcggagatgaaggtggctttgcccctaaatttgaaggaactgaagatggggttgaaaccatcttagaagccatcaaaaaagctggtttagaacctggccaagacgtcttcttaggctttgacatcgctgcttctgaattctaccatgatggagtgtatgactacactaaatttgaaggggacaagggagctaaacggtcagctgatgagcaagttgactacttggaagaattggtcaacaaataccctatcatctccattgaagacggaatggatgaaaacgactgggaaggttgggaaaaactcaccgaccgcttaggtgacaaggtccaactggttggcgatgacttattcgtcaccaacactgaaatcctggccaaaggaatcgaaaaaggtgttggtaactccatcttaatcaaggtcaaccaaattggtagcttaactgaaaccttcaacgccattgaaatggctaaacaagcaggctacacagccgttgtctcccaccgatctggtgaaacagaagatgcaactatttctgatattgccgtagcaaccaatgctggccaaatcaaaactgggtcactttcacggaccgaccgtattgccaaatacaaccaattgctccgcattgaagaaagcttaggccaacaagctgtctaccgcggcaaagatgctttttataacttaaacaaataaatataatcaacaaccaccagctgtgattgactattgcagctggtggtttactacatatggaactttttatggatttaatccaccaaaatattacaaaaaggtgtaggtcttgttacaagacgataaatgaattgattgcgaccaaggcttgtggtagattttaattaagatcacaggataggtggcggattcatgacaaaaagcaaaacaacccggataaaatttatggtacttggtctctgcttgggactcaacctgactttgtttaatcaaaaggtctgggccagcccccaaagccaaggaaacaatttttaccaagaagattccagtgagctttcagatgaatcatttgaccctgtaagagcaagaccttcagaccctgaccaggactggtatgagccaagaccagaccatcttagtcctggttccgaaatctttctgagggaagagaaagaaggcaatgcggaagcgagtccagaaaagactaaaattgaagttggattagaggcaaaagaggtccaaaagcaagctgtgtcctttaagacaaaccaagctaaggatgagccggaagaagcaaagcccaatccaatccaagccgaggaaaatgagtgggagggtcaaggggaagagcccaagccgaaacccgggcaaggtcgtgaggccaaaacaggaccagggcaggatagcgaacccaagcccgaacccaaaccaaagcctgcgccagggcctgaacccgatttgaagcctgagcccgcgccagggtctgaaccaaatccgggctccaaacctgaaccgggttcagaagctaaaccagagcctggggaccccaatcccgaaccagaaccgggtccagaaccgaagccagagcccgaaccaggccccaaaccggaacctaagccaagtccaagccccaaaccggaacccaaacctgagccgggtccagaacctgggccccagcctcaaccagaaccgattcctgaaccccaacctaagcatccaaggcctgctcctcaacctgaccgacctggcaaagatttaattagcgattaccagcctcaaggggaagagttggaccagctcattgatgtcctgctcagtgaaggccccagagaggctgagcggttgagagaccaatacgccaagaagaaggcgggaggtcagaaactgccggacacagcaacaacaagctggcttctaccaggcttaggcttattagccataggtctaggcattacgctaagatttaattataatagatgaggtgatcaaatgaagttgaaacagttgtcttttaccttggccagtttacttgtcctaactggatgccagggaggtaaccaagaaggggaccaagaccaaaatacccaggaagatactcaagtggaacaagacacggaccaggaagaagagaatagttcagaccaagaagcgaaccaaaattcaagcgatgaagaggaagcagacctagaaaccgaatcgcaagcgaaccaggttagtgacgataatgaccaagagtctgaccaaagccaagaggaaagcggtcaagaagaccaaagtcaggagaatcaagccgaccaagatcaaggagaccaggctaacaaggaagacatatctgaccgaactttcttatccaacttaaatgaaatttaccctattgtccgcgctgctaccaaccagtccaactacaatattagtgatgttctctttgaccaggatgaagaaggcgaccattacactatcgtggcttgggacggggctttccattatgaataccgaatcgacgccgaccagaatgaactagttgacagtcaagagaaaacaatgtggaacccctcgacatcattgaaatagacagcgtcctccagcctaatgaagccatggaccgggttcaagaagtaacaggtggagaggaaatttatagctggcaccttttctaccaacctgcctatgaccagcccgtttactccttcgaaaccgatgacgactatgtctttatcagtgccttagatggccaagaaattgaccaagaagagtaaggcctgacccctaaacttgtgactaggctaattgatctcccttcgttaacttaaagaggggggatcttattaagttctataatatttagtgttggtgggattggctcaccaacacttttttaatttttggtattgaaaaagccaactggttagtgaaaggatagttttggagttgaaaggcgacaatgggtcagtcattcggtactttgaaagttgaaaggcgacaatggtagcccaataaaagaattattcgcttggaagggcacaaaaaataaagtggaggcccttcaaagcagagtggaggtcaaagtttgactagtaataagtagctaggagccaaactagtttcttaaaaatgaagcctggaaaggctcaccaaggccaagtggttacaagctttttgcaaggcaaaggctatctataatttaacctggaaaagctcaaaacaaattgctaaagcgggtctacttactaaagaaaataattggttaaaagaaatttatgtgataaaatatggatgattatgacgagaaaaggaggccttgtttgtgtacgaattcctactaacctttatgttggttttatctatttttaccatactagtgattgctttacagcctacccggacgcaaagttcgtctaacgcctttatgggtggtgcaggtgaattattcgaaaaacaaaaagcgagaggactggaagcatttttaattaagacaacagttgtttgtttgattttattcttcggcgtttcctatgtcctatcccggtttttctaatgcaaatatgactaaacaagggtgatctaatcaagcttaactggcttataagaggtttagaccactctttttcttatacaggtaaaaggagtatcaacgaactttatgagtatggatgaaatttatcttgaacaggacggcgaccatgcaatactactcttgcatgcctacactagctattcaagggactttcgggtattttccaatgctttagaagaagctggctataccgtttatgcccctcacttttcaggccacgggattgaagacccagatggggtcatccaacatgggattgatgaatgggtcaagaacggccaagatgctttagaccgacttaaggctgaaggttatgaaaaaatttccgtcttcggtctttccctaggcggggtggttgcaagctatctagccttagaaaacccagatttagtcagtgctgggacattttcggcaccggtagcaggcaattatggtctgtccattgaagatgaatttaaagaatggtactacaataaaaaagaggccatgggttatagtcaagaagaagtagacgacttttaccaggattatgtccaagagggcttggcaaaagtaactgaggggattgaggcttttcgccaagaaaaaatggttgaccgctatcatgagattaccatgcccatttttattggccaagggggagaagataaaaatattgcccctgaacacggccaggcctttaaagatgccttggtcaatgccccggtcacttttaaactatacccgcatgctggccatgtccttaccattggccgggtcggtaaggaattgcgtgaagaccttcttgcatttttacaggaagcaaactaaactatgtcaaaggatgagtatgaatggctgaccttacaagtgaattagagaagaagatagtagactcgattggggctcgggacgaccttgaggtaaacgatatagcaagagctctggatatggagtctgctgaagaattcaagcaacttgtcaaggccattgccaagctcgagcgaagacaagaaattatattaaccagtaaaggaacatttattatcaaccaacaaaaaattgacgaagagatacaaggaagatttaaggcaaatgacaagggctttggctttgtcattttagaagattcagaccaagaagatatttttatcccagctaatgccaccaatactgcctttgatggcgaccaggtccaagtcgaaattatcaaggccccggacccgcgcaaggacaaggcagctgaagggaaaatcaccaagattttggagcggaaaaccgaaagtgtgattggtgaattctacccttattcggatgaagaagtaaaagacctagacttatacggttacgtcaagccgagtgtcaagggctatccggacttaaccattcaaatccagaccaagggcttacgtcccgtccagggtgaaattgtcaaagtcgacattacccgctacccccactatacccatgaagatacggtgggacttgtcactgagaccattggccacaaggatgagcctggggtcgacatcttgtcaattgtccacaagcatggcatcccatctgaatttccagaagaagttctggaccaagctcaggaggtgccggaccaaattagtccagaagacctcaaaggccgaaaagacttgcggcaagagaccatcatcaccattgatggggccgatgccaaggacttggatgatgccatccaggtcaaacggctaaacaatggccacttctcccttggggttcatattgccgatgttgcccattacgttcaagaagggacagccatggaccaggaagcctatgaaagagggacttcatcctacttgacagaccgggtgatccctatgctgccccagcgcttgtcgaatgggatttgctccctccatcctggcgtagaccggctaaccttatcctgccagatggaaattgaccaagcaggggaagttgtccaatatgacattggccccagtgtgatccagtccagtcagcggatgacctatcgggacgttaatgccatcttggacgaggatgaccaggccaaaaaagatgagtttgctgatttagtccccatgtttgaagacatggccgacctccaccacattttagaaaacaaacggaagaaaagaggggccatcgactttgaatccactgaagcacaaattgaagtggatgaccaaggccagccaactgacatcaaactcttggaaagagggacgggcgagaagttgattgaatcctttatgctggctgccaatgagaccgtgtcagagcactttaccaaacaacacttgcctatcctctaccgggtccatgagcaaccagatgaggccaaaattcagcgcttcttagaatttatcgccactttaggcattacggtcaaggcctccaaggacagcatttcacccaaagacttgcagaaggtcctagccaaggtagaaggccagcccactcaagtagtggttaacatgctcttgctccggtccatgcaacaagcccggtatgatgttgaccccttaggccactatggcttgggagccgaattttactcccactttacctcccctatccggcggtatccagaccttatcctccaccgcttgatccactactacgatgaagttggccggtctaagaaggatgtcaaaagatgggaggaaaaactgccggaaatcgcagaggctagctcttttgcagaacgccgggccatcgatgctgagcgagaaacggacgaactgaaaaaagtcgaatatatggcagataagataggccaagaatttaagggcatgattgtctccattactggctttggtatgtttatccaattgcccaacacggtggaaggcctggtccatatttccctcttagacgatgacttctatgaatttaatgacgagcacctagtcttagttggacagcggactggcaatatctaccggatcggccaagaaattaccgttaagttgatccgggcagacatccaaagtattcagattgactttgacttggtcagaggtaatgagggccaaaaccgtggtcaagacaagaaagccaagcataagaaaaaagcccacaagcacaaaggtaaaaaaggcaagcatgcgaagggtaagggcaaaaacaaccaccctgaccatggctccggcaaggggaatgacaagaaaaatcaacaaggtcatactgctggcaaaggcaaaaagaaaaacaagaagaaaaagcataaaaacaagaaagataaaaaacacaagcatccctttaaaattcgggagaaaaaataacaaaggaaggagggttctagatgccaaaaggtgatggcggactgattacccaaaaccgcaaggccagacacgagtatacagtcctggatacagttgaagctggtatcgtcttacatgggactgagatcaagtccatccgcaaccaccggatcaacttgaaggatggctatgccggtatccgcaacaatgaaatatggttgtataatgtccacatttccccctttgatgaaggcaaccgttttaaccacgacccggttcggaccaggaagttactcttgcaccgcaagcaaattgaccgtctgattggggaagtcaaacaaagtggtattaccctggtccccttaaaggtctacattaaaaatggggtggccaaggtcttactgggcctcgccaagggtaaaaaacaatacgataaaagagaaaccatcaaaagacgggaacaagagcggcggattgaaagagaatacaaaccccgttagggcaaaagctttcgtagccagctacggaagcttttttgctgtcgccattgcttgcagatttacaattagactagtaaaaaagagtcaaactaggtaaaaataaaaaacctgggtttatcccaggttttaactttcgattcttatcttgttttagttagtctttatccggtcccttgtattggagcggacgttcacctgactccaaggtttgaagggtatcgtaaacgtggcggataatattgctagcactggaaatatccaaagaaggcagggcgatttccttaccatcttccccctttacagagcttctaggattggcttcaattaaggcaatagccacttcaaccgcaagttctttatccgattttgtcataatcatgctcctttataatgattaattaagaggtggattgtaaaatcaagttagccacttgcatataataagtcatgtgaatttctgttatattagtagtcgacaaaaccaatgaatataaggagaattcacatgactcaagcccatgatagcacactttcccctaaaggaacacacttgactccaggggaatgtttcaagttgccctcggtaacgtgaaacatacttattaatttactatttttacaataagttaacgataaattgattgaataggctattaaagtgacttaaaatgtaagcgtgttagatactatataataaggcagttctttattacagttttagtgaatattaaatattgataaaattgaaaaggtctatataggagaaaatcatggaaaatattaattactcaaattttattgaagagaaaaaagaggaatacttggaagatattaaatcagatgaaattattgatgaaattactggaggagcttgtccgtggtggaatatttcctgccaacttggaaacacaggaagttattgtacgttaagtgttgagtgtatgcctggatgtcattaatttcactaaaatagaataggggattatagatgaatttagaaaaagaaaattatcacttgaaccaggaaaaggaattagaaaaaattgttaaaattgattcaatagaagaaattgataaagctaatggagcttcagcactttcgtgtacagttgttggaactttaattggagctagtgtaactctttgcccaacgacaaaatgttcaaaggaatgtgggagaagaaattaatagctagtatttagaattatatagtatctaacatttttattatataatggatatgaagtaattgtaaatatatggtggattgtaaatatataaaacttagtgaattcaaaaataactaggaggataataatggaaaataaacatggaatttgtattggtttaggcataatatttggttctgcttttggtagtttaattaataatatggctttagggatcggtgtcggtttagctataggtgctacgatagggaatacaaaaataggagggaagaagaagaataataaataactatttttattattctttttagatcgggaggtggattgtaaaatcaagttagtcccttgcatataaaaagtcatgtgaatttctgttatattggtagtcgactaaaccaattaatataaggagaattcacatgactcaagcccatgatagcacacttccccctaaaagaacacatttgactccagccgtaatgcataaaattgaagcatatatagcagaaggttatgccaatcggcagattgccaggctgttcgggcgctgtcggcaaaccatccacaatgccatctagaccggtttcgtcccccaaaaacgccaacagaaacaccagggaaagacttatacttattatgacgacatctatttcgccgacgttcatgccaaggcctaccaagaccaccgccggggtcgtcccaatcgaaagacgtcgggcccttcgattgaagaacgtcctcaagccattgggaagtcgacacggttgtggtccgaaagcgtcaaggggaaccccgtcttactgaccctggtggagtgcaaaacccggtttgaaaagctctttaaaatcccctgtcaaagtgccagggcgatacatcaaaccttacaaacctttttgaaaggactgaagacaatccagtcaagtctttcaatcgatcacagtcaataatagcagtgaatttgccagcttgggccaagtaatgcccgtccccatataaagcaaaagcagtgaccgtcggcaaaaatataactttgtagaatttagaaaattttaattactgggtggctaacctaaacttgaaatctacattttagatcaggagtgtttaaatgaagtataaatttatagacatagttagaaaaaatgttacagataattggttaaacattcaaatatatacccctaaagaatacaggattaattttaatattaataacttaaaaaatcaactttatcaagaaatagaaagtatagtacttcagctttactatgaatattttgatgaatttaggaaatgtacaatttataaggaagaaaatgacaataaattgaaattgttttacgaaaaaatatcttgtgatcaatttaaagaagaaattgttagctcatttccagagctagataaatatataaagaaaagagttgacttatttaataattatataaataaagtgttaaaagacttagaagtttggtgtatagataatagctttgaaacactagataatataaaatgttttagtggcgacagtcataatgggggacaatatgtatgtgaaataactatagataaaaaaaatgtattttactataaacctagaagtagcgaattagaattaaggttcaacaaacttttagttaggctaatggatgttgatgattttgtattattcagtagaggggatttttctatacaaaaatcgataacatatgtaagcccaaagagtaaagaagatattgaaaaatattattatcacttagggataatatcagctttattttatttttttaacagtacagatatgcattatgaaaatatgataatacataaagatttaccatatttttttgatttagaaacaatcacagctttaaacaataattatctaggaaatgaaataaaaaccattaaaaattttttgaataattcaatattaggaagcaatatttttccagctcctttactatctaataatattgatatatcagttattaccggtgttgattggaaagaaaaaggaaacttaaattatggaattaatatacaaaatgatggtactgataatattaaaatagaaaaaattagtagtgctttggaaaaaggaaataatgaaattgaatttaatggggaaaaaataaatccaattaattatctcgaaaatattgttgaaggatttaaatatgttggtgaaaaaattattaacaataaagacaaatttttagatttaatgtttaatgttattcaagatcaaaagataaggcaaataatacggcctactaatacatatgcaaagtttataaaaatatctttggaaccatattatctacaaaacgacagatttagaaattcgatttttaaaatttttaaagagggaatgtacaaatcatgcaaagcaatgattaattatgaaattaaaagtatgagaatgggagatataccagtgcttttttcagatgctgattctcataacttatatgatagttatggtaatgtgttagcaaaagattttttttctactacttgtaacgaaatgataaaatctaaagtagataacttttcaaaaaatgaaatgaataagcaaattgcattaatgaaatcaagtgtctatgtagcatgtttcaacaaatattctactagcaattttcctgatttaattgataaacgggaccttaaaaaagattactatcaattatgtatagactatttcagatctttttctaaagaagatgattatttctttaatatcaatgtaataggagacggacctaaattagctttatggcttacggattttagcttatatgagtctggcggaattttattattattatacttgaaatcagaattaggattatcaaataaatttttttatgaaatcacacagacagtgtataaattaaacactcaaattgacaagagtttgaatgcttttaatgggattggttcggaattatactttctatattctttttataggaatgagccttcattgttttatggtaagaaaataatagaaatacttaatgagattgaaaaaaagataactgtcgagactgtaaaagaatttgactattttagtggtctagctggagtactcgctgttttatcaaatatgtataatagcatggtgaccgatcagaaaaataaagatattgagatggaaaataaaacacttaatttaattaatataatccaaaaattaatgcttgataattatacaaagataatagataattatcaagcaggacttgcacatggattagctggtatttattattctttaggtgtaagttatcaatgtaataaaaaaaataaaatcaaaaaaatgtgcacggatttaattgatcaagaagaaaaatattattcagaaggagcaaatgactacttagatcctagggatcaatcagtagggaatttttatttatgctatggtatagttggtgttttgttagttagaatcgaactttatcgaataggcctcttagacaaaactataattgaagacaaagtagcgaaaattttagataaattaaaaagtaaaatcgatttttcttttatgacttattcattatgtcatggaattgctagtattatagagttaatgatatcaattcaattgataagtgaaaataaaagtgactgtaaagaaatattagataatttaattgttgaggaaatgagtaattttaggaatgggtacggtaataatgttgatattgattcttttatgaatggaagaatgggtaaaatatatgcagtacttcgaacatgtttaccaaaaataccttcttttcctctattaaagtttaatgtttattaaggagaggatatatgtttaaaaagagtgtaccgtatgtacaacaaatgcaagaaacagaatgtggactttgttgcgtaaatatgatattaaaatattatggatcaagagttaatatatcgtttctaaaaaataattttgaaataggtagagatggaatgtcagcaaaagaaattggttcattactatctcaatttaattttaaagttaatttttataaggctaatgttgaaggtttaaaagatgtatctgactcaccgtgtattttatactgggacaatattcattttgttattttagagaagattattaatcaaaaatattatatagttgatcctaaaataggcagacaagttcttgataaaaaacaaatgactgatcactttactaaatttgtcataaaaccaattatcaaaggagagataataaagaagaaggataaaaatacccaaaagaatttatattacacatttttttcaaaaaataaacttaggttttttattataacgatactttctttattagcatattttgttgcattgattgctccagcaattttgcagaaagttatagatgatattgttgaaggagactttattttattagacgaatatctaaaaatagctggaataattattttattatacgctatttttagatattgtagaagtatacaaactatttctttttcaaaattaatggatgaatatacgtataaggaagtgatagataaattattttccgtacctttcaatttctttttaacacgtaattctagtgacttgttatatagattatctttattaaaatcaaatagaaattttttgatcgatcaaataattgtttctatatttaatgtaataaacttagctattttactagttataatattttttattgatataaaaatattattaattgtagtagcaattagtttactagcgtttctagtgctttacccattacaaaagaaaataatggtattaagtcgaaaaatgatagcccatgaatccgatctccaatctaaagaatatgagactttgacttccatgtatgctatacaatctataggtttatcagatttttttaaagcaaaaatattcaacatatataattcttcaataaaatcttttgagaataagaataagacagaatctatatatggcataatctcctcgatgatggtaatgtttatgcctttggtcattattcttttagttattttatcgaacattattattagtgtaggtactatattttttttgaatacaattttaatatatttcttccaaagtatggatggtatcctgggatctattattagcttaaaccaatttaaaataaacaatgaaagaatacaagatatcataatgaccgattcaagagaagaacaaaaagctggtgtaaaaatcaaaaaaatcaaaaaaattcaatttaaaaatgtatcttacaagtatcctggtcaagaagaatatatacttagtgatataaatttaactataaatatgtcagataaaattggtatagtaggaaagaccggaagtggtaaaacaactttactaagtttgatgatgggtattattaaaccaaataaaggtgagatactagttaatggatataatatagatgatattgatattaaaacatttaggaaaaaaataggttatgttccacaagaatcttttattatatcatcttctataaaggataatattttaatggaacgtgaggtagatgattcgttattttataatgcgattggaatagcacaattaggagaagatatctataaactccctatgaaagaaaatactttagtatctgaagatggaagcaatttttctggaggacaaagacaacggttaggcatagctagagcgctattagaaaatcctgatcttattgtttttgatgaagcaacaagctcaattgacaattatactcagcaaaagatatctgactctattttaaaaatggagtgtacacaattattagtttcgcacagattgtcaactattgaaaatagtgacaaaattattgtaattgataagggaaaaattgttgaaagaggttcctcatatgaattacttcaagaaaagggactttattacagactatatactggagagatataaatggaactaaaagcaaattttttcaataattttaattatgaacaaaagaaaaaaatatatggaactaaaaataataaattctggtttatagaagtagatataatagagttttatttaaaaaaagttgataaatctattaaagaatatttctatgataatttgaggtattttcaaagcaaaactattctatctgaaatgcgacttttgactgattatttaaattatgtatttaagaatagtaaatatgattcatttataaatttttggaatgattataaaagaaaatttatggaaaatagtgaagttaaatttactttttttagtcagttcaaggaattatttcgccttttgaataagttttatagtagccaaataaactatattaattttatagttaacgatgttaacgagcataaaaataatttaaaaacaacttttaatataagtaatgtatatctaaaaagtattaaattaggctttggagatatgcacgaaggtggatattctacagcattgttgaatatcagtggaaagaaaatcatgctaaaaagaggagataatcatacaaaattagtgattgatttatacaacaattttcttgtttataatggattagaaaaaattcaatttaaaagtttagaatttgaagaatattattatgaaaaatattttgaaaaagacattattacaaatgtaagtagtctaatgcaaagcataggggtaatggtattcttagcatatttattgggactaactgatcttcattatgataatattatgatatcaaataacacattaattcctatagattgtgagactatttttaatactaaaaaaaataatagtaacagttatgattttagtggctctgtattcacctcatttttattaccttttaaaagaattaacaattgcttattgtcaggaattagttccgaaaacaatgtgtcactagaaaaaaaggattataagttggaaataagccagtcagggctaattgtaaaagaaaactcgggaaaaaaacttcaaagatcaattagttcattacaagggaataatctatatgattatacagatttaattgtaaaatcatttgaaaattcttatttatattttatccataatgaagagtggatcataagcaaaatagaaaaaatgatatccgataaaaagcatagaattttgaagaaaaatacatctgaatatattgaagcgttgattcaatcttactacccatttttaatggttgatactattgacagatttaatttttttaataagaagaataagtttagtaaaaaagaaatatatactttgatggacaatttagttccaacattttatgaagaaataaaaattgataaacattattatgacatgttttctagagaggacatggaaatacagcgacaacttattaaatcttctataaattttgaattgtttgaaaatcaaatggtcaatcataaccataattctagttcaaatgaaaaagattattatctttatttatataaagagttgattgaagccacttcagaattattttggatagatacaattacctataaaagcaatactaaagaaataacggaacttataaaagtaccaagtactatttatgcaggaaaatctggtatatgtctatttttattagaatatgcctatgaaaataacttgttagataaggatttaaaaatacatattcttatgaaggatatttatagatcttttataaaaatagtaaataatccatatagttcttgtggtatatatgatgggacctctggattgttttatttaatatataaatataaccaatatactaatagattcaataaaaatgaattattatcatttctaaagttgatgataaaaaatgtacaatatgataaacagttagatataatgtcagggcaagctgggctactaaagctattgatttacttgtacaaaaatggtgaaaaatatgattggattaaagaaggggttattaatatccaaagcattattattgataaaataaatagtaatgaggttttacacaaaaaatatttgggttattctcatggattagttggaataatttctgttctcgttgaaagtactaaaataaataaaatatttaaaatagaaaacattgttgaaaattttgttacttacctatctagtgtaatggaagaaaataaggggatacctagtactatagaaaagttatctttctataatagttggtgtcatgggaattcgggatttttactgggattattcaacatttacaaaatatataaaagcgatatattgctagaaattatgtatgagcttattaaaatattatctaaagatagaatggataatttcaagttatgccatggggatcttggtaattatttgatttgctataatgtgtcgttgtatcttgatgatttatattacattaagttatttaaaacaaaactagacatgcttgttcataaattgaatgtacaagattttaaattttataacaaaaatattatggttggcttatctggtttatattattggaaattattaaattgggatatgagtaatcaactagatattatatagagagggctattataatggaaagtaaatatattatcaaaattgataaattaagtaaaagctataagcaaaaggatgctttaaaagatatttcgttgaatatttttagagggagcgtaaccggcctttttggagaaaacggggctggaaagacaactctgatgaagctgctaactaatcaaattaaagcggataaaggtagtatcgtgattaacgggtcacctttaatttttaattctaaagttaatgctcaaattggttgtcttcttgaaaaaccaccattatacccttatttaacagctgaacaacatttatcattgtttaaaacactgaaatacgatggacaagatttatcaaccaaagaattaatagaagtttatgatctgactaaatttaaagatgtaaaagctaaagaatattctctaggaatgagtcagcgactaggacttgcaattgcggaactgtcttgtgatgacatccttatattagacgaaccttttaatggcttagatcccgtgagtgttaatagattaagagaacgtatattgactttaaaaaacaaaggagtgacgattattctgtctagtcatttgattagggagttagaaaatgtcatcgacaatttgataattatttctcaaggtaggttgctagattcgattagtatagatgattttatgaatggtaaagatacttctttagaacacgagatattaaaaataatggagggtcaaaatggcgaacttatttaactttgaatattacaaactaaacaagcaaaaaagatttcttattctaattgcgacgacatttatttttcaattactaatggcaatttttataaagtataatgaagacttcatgtcctatgaaagagctattcagtactccttccttgcaccttatgtcattaacgttagtattatttttttggcttgtacaatgttaacggaagattttgaacatcttacaattgtgccaataaaaatgaaatacccaaatctttcaaagttgatttcagttaaattaattctgatattatttacacatatagtcttattgtttttaagtgcttgttttactatacttcttgcatatacactgttaaattatgatcttaatttagaaatgatttcagatgtttatctttatagcctaactatgattctgccaattgctactattatacttttggcagctatcgctagcttaatcacaaaaaaagaaaaaactggtttaattatttctctgattatttacctactttacggcttaggaacaggtttaaattttttaattattcagaatctccctgtctttaagtatggtattgttaatcttatgaatttatctaaccaattaatagattctaggtatattgaaatgacacaactaagtcatgtcaatatgatcactgtcataattgtgtatttaattattgagtctattatactttttatactatcaaaggaaatagaattataattagtaattttgtttttatgtaaatttctatatctaaaataacgatttaaccatattggtagtgggttgttagattgctatttactcagtaagcgtttagtaattcaaaatataatgaaagagatttctattattcaactacgatacctaaaatgagaagaatcattgtggaatctttcgttacaaagatgatttaaataataaaagttgaaagccatcagcataactctgttgtcggtacttattgattgatatgaatagactgcctacagtataccaagcaattttaactgaaaacaatatttgctagcaataaggtcaaacagcacaaaagcctagctaatccagcaccagctaggctttcttgttttctggctaagctatagggtcaggatgcccagttgggtatagaagaggacaaaaaggtagaggattgggatggataagagggttcggtagataaagacccagatgacgtcaagaaagttaaagccaattttggtgtccaccaagaccatacccgtttcggcgaggaagatgagttgggtgaaagagagaacaccgataaagaagcgggcagcctgggaagctgattgggtaatgaagacagtggggaggtacatatcagctaagcccacaatggaagctggccccattaaggcagctgtgtcacttggaaagcccaggaagtcatacaagtagactaggggaacactgatgatttcaaaaataggggtgtgctcaatgatggttaatgctagcacaccaaccgccataataataggcagtaggctgacatagatgttggcgatctcttgaaaggcataagccatggcttccaaaaagcctctggattctgcttggtcggttgcttgttcataggcaaagccaagccgacttttgccttcaggaactacaatgtcatttttttgttgtttttggtcgccgtaatattcgtccttgaatttttttaaggggaaacgggcggtaatcatggcaattaggatgacggttaaaaatagggttaagtaaaaaagggggaagatatgtcccaagcctaattcctctgcaactgcggtggcaaaggcaattcccacgatggagaagttggtggcaatgaggtaggcctgacgttgggtgtagtaacccctgcggtactggttgtcagttacaatcaagcccaaggtcccatcgccgacaaaactggtcaaggcatcgaccgtagcggctccagggattttaaagagggactccataaaaggttcggttagaacagccaaaaattccaccgtcccaaagtgggtcaagaaggggatcccgataatacccacgaagaaggtgataaagagggtggttaaaaggcctccttcgcccgccaagaccccaccggtatcagggtctaaaatatattgggcccaggcttggtcagcaaaccaattgttcatgaccatgaggtacaaaaaggaacccacaatccgcaagattgtattaatggggttggttttaaacaggccatcgataaacttgttgcctgtcttgacaaagataaagacaatggttgcaatcaagataatccacatgaccacttgggtgaaggctaggaaggccccaatgaaattttcctcgacaaagttggtggcatgggacaagagaatccttgactcaccgttaatggggatggggactaggaagaagatgattcctaggatcgaaaagaatataaacttaaaatcttttcctttcatttgttatgtaaaacctcctatagtgcttgtggtggctctctatgaacaaacaccacacttttgtcaaaaaagttttttacaattataacacagatgactttaaacgagtaagggcaaaaggattagtctttactaaaatctagccttataaataagaaaaaagcagacctcttctgtttcatcagaggcctgcttctttcattcactcttattagtctggacggctcaaatatagtttagccttcataacacttggctagctttgaacttatatgctagaagatcaagtacttggtctggtttgtcctggtgcaaaaacataaaaatggagctggcgggagtcgaacccgcgtccaggcatattgccactgaaacctctacgctcatagttttactatttcatttcgcttcatcttagccgtaaaacgggcatgggatgtcgctagtctggtcatctcttctgacttttacagacggaaaaagtcagcgtatcccactaaattataggacctgaagctgcaacatgggcgatcccagttcagatctagcagaagctacttacgcagctaaagctaagttagaatttttttcgtttgcagttaaatttaaactgaatgcgttgatgggcagacgcaaccctgccaaaacgcagtaacagctcaatctatgcctgtcgaatccgtaacagcccccaaatgaaaataacctaaccaacagtatacagctatagggcaaaaaagtcaatttacagtcaagtccaaatctatgtgtaaattctacaatatagtaacaggtgttatactatgggctttttctttttccgtcggtcggcgtgatcgacccaacacaccgtttggcgagcggaaagagtgggcttctcttaaagcgagccagcggtgtgttagattacgccaagtgaccgagggaaaaagccccttttccagagggaggcaggttttaaagggggttttaaaagttcagcctatcgtaaaaatcgatagttctgagcttcccaattctcctgtaggttcaataagaccgagcccgctaaccgctctgcggatttgatattggggaaaatccccaccactctttcccgacgtcgaatttcacggttgactcgttcaatagaattggttgttctcaaagacatatggtaagtagaaggctcaatttgatactgaatggcatcttcaaagccctcatctaatagattcaaggctttggccagcttcgcttggtcttcgaactcagcctccaaagcctgtttccgttcacgagcttcctgctgggttctggaaaataaaaccgcttggaagcgatcccggatgactcggtccgtggtcttcggcaaggcatccgtgatattgcttaataagtggaaggtacagcgttgccaagtggtgttgacaaaacattcttgaatggctttgcgtaagccagcatgggcatctgaaatcaccattttcggcgtatcaatgcctctggcttttaaatcgaggaagaacgaccgccaactttccgttgactcttgcccagccactttaaacccgatgatttctcgcctattctcatcattgactccttgggcgatgtaaagggctttggacaccacccggttatcctctcggacctttatatacatggcatcgacataaatataccggaaatcgctatgcgtgagcgatcgcttttgaaagttaaagacatccttgtctaggtgtttattgacatcggagacgaacgatttggagaccttttgaccacaaagggattcaacaactttggtcattttgcgggtggagacgccattgacgtacatttcaaagatggtagccaataagccttgatccatccgctgattgagttcaaataattgggtatggaagtcgcctgaccgcgttctgggcacgttgagtttgagggtgccgattttcgtggtgaaatctcgctcgtaatacccattgcggtaatcgcatcgatcttcatctcgctcataccgcttgcttttcatatattggtcgcgctcagactccatataagcgtttaagaccgtgactaaggtggatttcatcacttgatccagatcacaatttaaaattgcgtctgttaatttattggcgtctagtgtaagattgagttgagtcataatgatcttcctttcaatgtgttttttggttttctataactacattgtagctcaaaaaggtcattatgactttttctttttacacaattatatggactttatcaatttacttataaaactattttggcctgagtttctagagtcatcaaacaactgtgacacccgcttctaggaatggtaaaagctaaatttgcaagcaagttagcttttaccatagcttcggtttagttttggccctaaaatttgttaaaataaggaagtaagggagactgaggaagaagggttaaagttaaatggaagataagataggaacttttgccgactatgtaagatcagcccagtccatagccttttttggtggggcaggtgtgtctactgaaagtggcctgcctgactaccggtctcataatggcgtctatactgctatggagaacaagggtaaggaccctaagaaggttatgcacatcaactacctgctcaaccatcccaaggaattcttcaaacggcggaaagatgacagggatatcaaacccaatcccgcccacaaggccttggcgaccttagaaaaaatggggaaagaagtccacatcatcacccaaaatgtcgacagtctccaccaaaaagctggttcttccagcgtttatgaactgcatggatccaaccgtacctggttttgtatggattgtggccaggaggtcaaagaaacggatgtagtctttgaagatgacctgcccacctgtcaaaattgctcgggtctaatgcggcctagtgtcacctattttggtgaaatgcccaaccgagaaacctccgaagcggctcggaacttgattgcccaagctgaccttttgattattgcagggacatcgcttacggttagtccagccaaaagtttgattaatgccttccaaggcggccatacagtggttatcaaccgggaggccattaaacgaattcggattccggttgacttgactttccaggattcagttggagtcatcatgcaagagttgatcgatcgaatacaagagggggaataacaatgggggaattacgagagagaattaaggctagaacagaggaaaacaaggacaagctattggactatttaaaattggagtcggtttcggcccaaagaagggagattgatgaaacagcggcctatgtcaaaaacttgctggaagaatttggggcagaagcagaagttttaagcctggccgacaagcccttagcccaccccgtcgtctatggttttattccagcaaaagaagccaacaagccgaccttactcatttacaaccactatgatgtccagccggaagacccggttgaggagtggcgaactagaccctttgaaccagttgaaaaagacggggccatctattgccggggtgtgtctgataacaaggccaacttgattgcccggctcaatgccatccagctcttcttagaagaccatgatggcctgccgatcaatattaagttcctcattgaaggggaagaagagatcggtagtgtccacattgatgattatttagcccaataccaggacaagtttgctgcagatgcctgcatctgggagtcagggagcaaagacggccaaggacggctccacatgtctgccgggatgaaggggattgcttactttgatttggccaaccaaacagctgatattgatgtccactcttcacaagctgctatcgtggacaatgctgcttggcgtctaacccaggccttggcgagtatgaaagatgccaagaaccgaattactattgacggtttttacgacttaatggaagaacctagcccagaagctcgggcttacttggaccaagttccatttgaccctgattcactaaaagagggcttaaacctacggacaccctttatcacaaatgaccttgactacagtgaaaaagaagccctctacttctacccaaccttgaccatcagtggcttggatgcaggctaccaaggggagggggctaaaaccatcttgcctaagtcggctcgggccaaactggatgtccggctagtgccaggctacacacctgaaaatgttcaaaatctcttgcgagaccacttagactcgcatggctatgctgattttaacttggacttgattgcagctgttaaacctttccggacagacctgaccgatccttttattgacttgatggtccaaactggtgaggccgtttacggggaaggcaaggccattatcacccctaactcacccggaactggtccaatgcagtcttttggtcactatctcggtgtgccgattgtgggcatcgggtcagaatacagaggatcaggtgcccatgctccaaacgaacacattcgttgggaagacttctatgataatatcgcccacattcttggcataattgaaaattttgaccaagtaaattggacaaactagagaaaaaacttaaatatatggtaaaatgaggcacattaccagtgcttcattttattgtgcttaaagaaagagcatatgggaaagattcttataccattgagtgatccttagaaagtaggcagaccatgtctaagaagaataaagcagttgaagttgacattattgaaaccgaccgccacaaggaagaccaggtagacttggaagtcaaggtgaagaaaaaaaccataggccagattcaaaaaccacctggccaaagccaggtgaccgccttgatgtcttccggcaaaaaacgccaagtcaaatcagtcgacgaagccatccaagctattatcgctgagtataacttgcatgacctataaagggggaagttatggaaaaactggaaaaatatgaagataaaatcccacataaaaaggaattaatccaagccattgaaattggcatgcgacacatggaccggattatgctaccccagagtgcggctgagatgacttatttcatactcttatctattattcctattatcttagtcatcgctaacattatcccgatgctaccgattgccacagaccaggtcttgtctattgtccaagaagttattccggctgatgtctataatgttttagagccaaccctgatgggctatttagaagggggaagcgggggagctatttccattggtttaattaccgccctcttctctgctagtcggattgtgtcgattttgaaccggtccttagatgagatatatggaacggtggacaagcggaactttgtcttagagcggattgtttcttttttaattatgctagggattatagccctagccggtttagccctctttgtctttatttttggtgaagctattttgggctttgtccaagacttgctcggtttagattttacctttatgaacatctttatgatctttcgctgggtaattgtcctagtcttattccccttgatctttttgattatttaccatgtcctacccagccaccacctggaactcaaatactcccttccaggggccatctttgcggctgttgcttctatcatcctttccgaattttataccttgattttacgtcttttcggtggggatgcggtggggaatgctacttttggtgcagtgatcgtcctcatgcttttcctctatattgccaatatgattaccttcatcggagccatgatcaatacctttatctttgaatgggtcaacgaggagtccgttgaggcttacgaacacgacatgcaccggaaggaacagttggaaaacaccaagtggaagggttaccctgacaaccagaagacccaaatcttaagacacaaactctataaaacggattatctgaagtccttaaacagtgaaagtgacgacaaggttgaaatgaataaattgtcggatgaataggaaggttgataaggtgttaaaagtatactgccaccccaaatgtacgacttgtaaaaaagctgaagcctggcttcaagaccaaggccttgaatacgactgggttgatattcgccaagaacaaccagaccgagacctggtcttacaggcactaaaagagtcaggtcgaagccggaagagtttttttaataccagtggtaaggcctaccgtgaccaaggcgttaaggatcaattggagggcatgacggatgaagaagcagttgacctcttgttatctgacggcatgctcatcaaacgtccctttgtaaccgatggccaaaacgtaacatctggttttaaggaagaccaatttagggaagtatggaaaggatagggtagatatgataatcaaataccatgcaaatggcttgtatgtaaaaaaagatggggacctctaccaaatcggactctccgacaagggccaggacgatgtgggcgatgtgatgttttgtgacctagccaagcaagagggacacttgagtaaaggggataccattatgggggtggaaggggctaaggctgttactgattttacagcccccgtcgacggtcagatcgtagcggccaaccaggccattgaagaccaacctgacctacttaactccagtagccaggaagagaattggattctcaaattagaagaagttaaagaagaagactttaaccaactaagtgaccaggcttggcctgaggaagatgactagacaaatgaaaccagcccggtttatacttgaactgggctggtttttataatcctattttacttgctccctatcccttgcttttgacaaggtcaatgaaggcattaaatatcttttgggaattatcgtctaccttatacatccactctgggtgccattggataaggtagtggtccaagttaggatctgtatgctccattgcctcaataataccgtctttggcccaagcagttggacggagaccttgggcgacttccttgatagcctggtggtggtaggagttgactacaatctcagagcctaagatttggctgagccaggtgtctttttctaggtcaacggtgtgagtgtacttaaaggtaacagaccgctggacatgttggatgcttaagtcctcatattcttccaaatcctggtagaggctcccccctaaagcaacattgtagatttgcattcctcggcagacccctagtatgggtttgtgttgctggattgcttcttggaccaaggcaatctcaaagtcgtcccgcttaatattggtagaagccaggtgaacactgggttcttggccgaagctaagcgggttgacatcttgaccgccagttaagataagggcgtcgatacggttgatatagtctttagctgtttggggatcgttgacgggaatgataaaggggagggcaccagtgtcttggacactctccacaaagcctaatggagtataggcgatttcaatatttaatcctttattctcaattggagttttggtattacccgaaattccgataataggcgtcatacacaacaattcctttcaatccaaaaaatatcctgtaacgataatagtatacaaaaaaatgggaagaggttaaatcaagaggcttaattgaagccgctttagtgcatgtcttgaaatagatagccttttccttgataatggctataatatgctatagaataggacagaatgctaattgagaattgttttcagtcgtttaggctggactagcagttacatacatcagcatcaaagaaaaataaaaaggaaggtcagatatgtctgtattagaaatcaaaaatcttcacgtccgtgtcgaagaaaaagaaatcctaaagggagttaatatgaccatcaacactggtgaaatccatgcggttatgggcccaaacggaacaggtaagtccaccttggcagctgccatcatgggccacccagcttatgaggtcactgaaggggaagtgttaattgacggcgagaacatcttggaattggaaacagatgaaagggccttggctggtctcttcttagcagtccaatacccaagtgaaattgctgggattaccaatgctgagttcctccgggcatcgatcaatgctcgtcgggatgaagatgacaagatcagtgtcatggactttattaaaaaaatggatgagaagatggaactgctagacatgcccaaagaaatggcagaacgttacttaaatgaaggcttctctggtggggagaaaaaacgaaatgaaatccttcaattattaatgattgaaccaacctttgccatcctagatgaaattgactctggtttagacatagatgctttgaaagtcgtagccaaaggggttaaccaaatgcgcggtgatgattttggatcgttgatcattacccactaccaacgcttgctagaatacattgaacctgatgttgttcacattatgatggatggccgggtggtcaagacaggcgatgcccaattggctgctcaattagaggctgaaggttacaagggactcgttgaagaacttggcttagacattgacttagaagaagaataagaggaggctataaaaatggcagacaaggttgaatcatatgtaagtcatgctgatgctgtacaagcctactccaaaaaactacaagagccagattggatgctacaactaagattagaagctctagacaagatagatgacttacaggaaccgagaattgaacgcttgcgctacaaccgctggccattgtggcaattgcctaatttagaagcaggcgacaaagcaagtgacattgactacactaaatatgtaccaaaactccatacagacaatattgttatccaagctggtaaccagtctgtagtagaagagttgccccaatccttgaaagataaaggggtggtttttactgatattaaaactgccttaagagattacccagacttggttaaagaagcctatatgacaactgctctacaacccgacaagaacaagattaccgcctttcacgctgcctttatgaactcaggcttgtttttgtatgttcctaaaaatgtagtcattgaagacccactcgaggccatctttatccaagatgccttagtccaagacagctatattaagcacgtcctggtttatgccggtcctaactcgcaatttgattatgtggaacgctggttgaccgctggggacgagaaaacatcggccaatattattgttgaagtcattgcccaggcgaatgctaaaattcgcttctcctcagttgacttactcggccaaaacaccaccgcctacttcaaccggattggtcatgtgggccgggatgccaatatcgactgggcgatcggagcaatgaataatggtaatgtcattgtcgacttagataccgacctagttggcgacgggtctgaaacagatctcaaggcggtcggtatcagttggggcaaacagacccaagtcattgattccaatgtggtcaactttggcagcaactccaacggtaacattttccagcatggggtcatcttagaccgaggaaccttgacctttaatggggttggtcagatccaccgcaatgctaaagacgctaatgcccagcaagaatcccgagtcctcatgctgtcagaaaaagctcgtggggatgccaaccccatccttttaattgatgaatttgaagttgaggctggccacgctgcttctattggacgggtagacccaaatgagttatactacctaatgagtcggggtatccctaaagcagaagccgagcgattggttatccgaggtttcttaggagcagtgatttcagctatcccgtctaaggttgtacgcgaagaattgattgatacaatcgaaaggaagttactttcacgatgagcctagaccaggaaaagttgcgccgggactttcctattctcaaccaagaagttaacgatgaacctttagtttatttagacaatgccgcttcgacccaaaaacctaagcaggttattgacaagattcagacctattatgaagagtcgaacgccaatgtctaccggggagttcatgccctgtcagagcgggccacccgcttgtatgaagaagcccggcacaaattggctgactttattggagccagccaggcagaagaagtgattttcacccgagggaccactactggactgaactgggtcgctcaaaatttaggtcaattggttttggaagaaggggacgaaatcttaatatcctacatggaacaccactccaatatcatcccctggcagcaaatcgcaaagatcacaggagcccaattgcggtatattgatctgaccccagacggccagttggacctagacgatgccaagaataaaatcagtccaaatacaaagattttagccatcacccatgtctctaatgtccttggggtgattaatccaatcaaggaactaggccagctcatccaccagcagggagggaccttggtggtagacggagcccaggcagtccctcacatggccattgacgtccaagacttggatgctgatttttatgcttttagtgggcataaaatgtgcgggcctacaggaattggtgtattatatggtaaaagaaaatggttggaagccattgagcctgctgaattcggtggggaaatgatccaagttgttgacttatacgacagcacttgggctgacttgccccataaatttgaggctgggacccccaatattgctggcgcaattggcctggcagcagctgtcgattacttgcaagacttaggcatggaccaaatcttccaacatgagcatgacctagccagttacacccttggccgtttgcaagctaaagatggggtgaccgttttcgggccaagtgaccctgataaacggtcgggggtcattgccttcaatatcgatggcctccacccgcatgatgtggccaccgccttggatctagaaggtgtggctatccgagctggtcaccactgtgcccaaccactgatgaagtatatcaaacaacctgcaacagctcgtgccagtttttacctctataataccaaggctgatgcagataaattgctagaagcaatcgataagacgaaggagtttttttcaaatgggcttgactaggttagatcaattataccgtgccgttatcctagaccactctaaagacccccgtcataaaggacaactcgaccgggtggatgccgtcatggccttgcgcaatccgacctgtggcgatgaaatacaagtccaggtcaagttagatgaccagggccaggttatccaagatgtatcctttgatggccagggctgtaccatttctatggccagtgccagtatgatgacagaagcgatcatgggcaagagcctagaccaggtaaaagacctttaccaaaccttctccgacctggtccagggtaaagaacctgaacaaactgaagacttgggagatgccgtcatgctagaaggagtccgccagtttccaagccgggtacggtgtgctaccttgtcatggaaagctctcaataaggccttagagaatactgggtctggccttgacgaaaatacatcagaagacatatacgattaagtcagattggattgaaaccgggaaagggagaatgaataaaatggtaaaagatgtaccaactagagattaccaatttggttttcatgatgacgttgaaagtatttacgacaccggtaaagggttaaacgaagatattattagagaaatctctgcccgcaaaaatgaaccagaatggatgctagactaccggctaaaagcctacaagcactataaagaccgcccagtacccacatggggggcagatttatcgggagtagactttgacaactatacttactaccggaaagccagcgaaaaacccgaacgcgattgggatgacgtccctgaaaaaattaaagaaacctttgaccgcttgggtgtgcctgaagccgaacgtcaatacttagcagggtcaggtgcccaatatgagtcagaagttgtctatcacaacatgaaagaagagttcgaaaaacaagggattgtctttatggataccgactctgccttgcaagagtatcctgaactcttcaaagaacacttcgggacagtggtacccccaactgacaacaagctcgctgccttaaactcatccgtttggtctggtggaacctttatctacgttcctaaaggggtcaagtgtgacgtcccccttcaaatgtacttccggattaacgaagaaatgatgggccaattcgaacgaaccttgattattgtggatgaaggagccagtgtccactacgtagaaggctgtaccgctccaaccttctcagcttcctccctccacgcagcagtggttgaaatcatcgtcaaaaaagatgcctactgccgctataccaccattcaaaactggtctgacaatgtatacaacttagtcactaaacgagcccatgctgcagaaggggctacagttgagtgggttgacggcaaccttggagctaaaacaaccatgaaatacccaagcatccacctcaatggtgaaggggcaagaggaacgaccatgtctatcgctatggctggtgccaaccaagtccaagatactggggctaaaatgatccacaatgcacccaacacctctagctccattgtatctaagtccatctcaaaagatggtggagaggtcaactaccgcggccaggttgtctttgggaaaaattcgtcaggttctatttcccacattgaatgtgacaccattattatggatgaattgtccaagtcagacacgattccattcaatgaaatccacaacaacaatgtcgccttggaacacgaggccaaggtctcaaaaatttcagaagagcagctttactacctaatgagccgtggactggacgaagagacagcaactgaaatgattgtcatgggatttgttgagccgttctctaaagaattgccaatggaatatgcggtcgaattgaaccgtctaatctcatacgagatggaagggtcagtgggttagagctaataaagcccataacaataggctttatcttgggaattggataattttgtcatcctttttgtacgaccctttaatcttttctcaaaaaccaacaataataggcaaaaaggccaactctttcgagttggcctttttgcttgcataggggtggtttattgttggtcaaaactttactcaaaaataacaaaatttatctagcttttttcgagggggaagtataattatcgtaatttcactgagaccggtgggaaaggctactgaaatctacatattttatggataggagggagcacagtccaaaatccagtacaagttttagactggaaaaggagttggaaaatatcagttcgaaagtcaaaaaacaatcaaattttgactttttgtcaaaaaagctacggtaagagaaaagagagataagaaaatttacataaatattacaaaaaacatcttgtattattttaattttgaagtaatatagtaatatattaaggaggttttagtatgaagaaaagttttatctcaaaagttgttgttggttcttccttgctaggagcattcggtttaggcattgttgcggaagccgggcaaacttacactaattatagcactactgttggaagactaaatggaagtggctatacaagctatcagactaaatctgtttccggtcagaaagccgatgtatatttagcaaataacggtgggtacaaagtggatgttcggactaattcacgagatggttctagtggtgaatggtcccgaggattaacggctggaagtagaagacaattgactaatgggcataataaaggaagtaaagttcgtcttcattttagcaataatattaccacgcgagttaatacacaggcacaaggcaattggcgttccaattaaatacttattctaatatgtattaaaaatattttaaggtgaagtgctaactagccttcatcttttaatttaggtgattttaatgaagaaaataataaaagaagatctaaaccaagctatttttactagactcggactgatggttctagctcttgtccttatacccatactttataatttaatccggatcaatgatttcaatttagtgagtccactccaatattttgaatttaatatttccctatttctgccttttctctttcccttatttgcgattttgatttttgcccaacctttttctcatgaattttccaaccattacctcctctatactcggacaagaatagacttgaaagattatataaatgggaagttaatcagtaatgctagcttggtctttttgggatttttcctggttgtgatagccttgtttgtgttttcagtctatattgaaccccagctaggtctaataaactataggcctgaactggtggtcgattcagtagaagagctgacaagatttgatcaagggcttttcactttttcccaacttattgctagcagtccctggctctttgcttttgtgtatgctagctgggtggctttgaatgctgtagcttattctagtttggctattctctgcctattattgattccaaatatttttatcgccctctccattcccttcttgttctaccatatcgcatcatttattattgccctgctcggttttccagaatttttatttgatgcaagtatctttcccttcaatgttgatcagcaaagtataacgaccgtttttctaccttttacagtggtccttattctcaatatcctgacctactttctattcctgaaaagagattgggaagggaagctagtatagacatgaaagaatttataaagaagcaggtaaaattagtcttgtccttggcccttgtcctagttttttacatctattccttatctatccaccaagacctactaggccgggcaggatcagtgtccaatttgaatttttgggatatggctctgtcattactgagtgacccttatttgtttatctattttacccttcccatttttctctttatttgtgtttaccaggtagagacgaactttgactatggtttgattatccgttttaaaagctatactgcctggatcttttacaccttgcatgaattggcaggctatatttttacctattttgccttaatggggcttacccttgccttagttttagtgactggcccttattcgctcagtttggcttggagtccctttagccaggccagtgtgaataatggtttgaatctggatatccttccttccttaatgttaaccggtttgagtcccttgttaactggcctaatccagctggcctatagcttggtatttttcctccttttggccttgatgctcactataatttatctgtttagccagagaaaggtctaccttatcggggctagcatcttcatttttatctacgcggcaacttctttccaattcttgcctgaagaattatcctttttgtcattagcctcttatgccaagttctaccatggctttatggcatttaaatcaatctttactcccttcattctgatgggtgggttggcattagtcctattacttggccaggctttttttcgtcaatcttccattttagtagaccagttaaaaagtgctctgccttacctgatatatacagtcttagtcttcttaggcttgtcttctaccttacttgaatatgatggtatgggtcagactgtgggggattttatttttttaaaattttacggtgtcgctagcacaggcttttccctcttgtctctgctttattatcttattgtatttttaggttttacctatttctttcaagtatacttgaatgactttatcagccaacaattaagctactacctgatccgctacaaaagttacagggcttggtttcattccctaatgattggcttgagtttggtcatcttagtctttcttttaggacttgctttactagctagcttacttggtctggtcaagggctatcaattttcctaccaagttaagatggatacggtcaatctgtcagcccttgaattagtggtccacttccttttgaatggttccctgcaattactgaattatggcctgctgctcttggtcgtaacctggctggtccaggatgctatctacggcctattaggcttaggtatttttatggttttaatgttgccgagtatcaatatgggccaggtcttaccgatgggtcttaacagctttggtttattagacaaggtgagcttgcttggcctgactttccgtctggtcctctaccttattcttgagtacggcttgatccgactcttattaaagcaattcaattctggattagtgaggttaaaaagatgagtattatagaattatccaatgtcagcaagagtttaaatggtattcccttgtttgtcaatgtcaatttaaaggttgaaaaaggcgaaatatacggaatacggggacacaatgggtctgggaagtctgttctgtttaaaatcatgtgtgggtttatgaagccagactcgggtctggtcaaaattgaccaccactataagaatgaaaaagatgactttcctgaaaagttcggtgtcttgattgaccaagctggctacaaggctaaccagactggctttgacaacttaaaatccctggccgctattaatgacctgatttctgaccaggacatccgccaggccatggagagggttggcttgaacccagatatcaagcaaaaaatgcgcaactattccttagggatgaagcagaaggtggggatagtccaggccttcatggaggggcaagaagtcttgcttttggatgagccctttaacgccttggatgtcgctagtgtcaaccaggttagggacttaatccttggtttcaaaaaggaagggaagacagttgttctcaccagccacaaccaggaagacttagaccttttgtgcgaccagcaatatttaatcaaccaagaaagcttggaaagaataaaatagggcaagctagaatagaccaggctaggcttttgacaagcttagcctggttttgcttgggcttatgtctggatacatattattaataaaattaataaatagattaaaaagtttgttcagttcataaaattgtgtgagcataacttgtgcaaagaatatataataatgatatgatattaatagttagaagttgtataagtttatatttgtgcaatattaatatggaggtatgtgaaaacatgaaaattgtcgccttgtttaccaaagatgaaaattaacaatacgacaaccaactattaagtgaagcaaatgctcttggcttgaaagacttcttagatgaagatgatgaacttgttacggttgaaagcaatgaagaattagacgaccacttgagtgatgtcgaagtaattattagttcgcccttcctgcccctttatgttaccaaagaacggattgaaaaggcaccaaagcttaaactatccattactgctggagttgggtcagaccacgtggacttaaaagcagctgatgaacacgatgttgcagtggtagaagtgaccgggtctaaccgggtttcaaccgctgaacatgcagtcttgaacattattgtcttagtccggaacttccaagaagggaaccgccaagcccgtgaaggggagtgggacttgtctaaattagggaaccgggcccaagacttggaaggcaagaaagttggtattatgggatacggtctcattggtcagatggtggctgaaagactagctccatttggtgtcgaaattcaacactatgacccagccaaggatgaagacagtgagtattccaaagcagtttcctttgatgagctgatcgaaagctccgacattatctctatccacactccgttgacaaagtcaacagaaggcttgtttgacaaggaagtcttccagaagatgaaagattctgcccacttagtcaatgtgtcacggggagccatcgttaatactgaagacttgaaagaagccttagaaaatgatgtcatagcaggttatggtggagatgtttggtacccacaaccagcaccaagtgaccacccttggagaagtctacctgaaacaagaaactccatgaccccacactatggtggaatgaccattgatgctcaaaaacgtatccaggatggggtccatgaattattgaccaattacaaaaatggagaagaatttgaccctaaacatgtcatcgtcggacctgagggattaagtgactcctacactgtcgaataattttgaaggaaatacctatgggatggcaaacatccctgtttaaaaaagcgaacccgatcaaaattaatttttgatcgggttcgctgcatttattaaagaactaaacacggacataaaaccaaggaaatataaatcaaaaaacgattcacaattgtatcggaatagggcactattctttttttgttttcttacctttaagcaattcaagtagatcttttaaacgagaatcgattcgaatgattttgtatagggcatagacggcaaatagtttaaatagaaggtctaaaaaagagaataaaaagacaaagagggtatgatctgcggtattaggcaacatggtccttcctcccactatatatgcgtttattatattatacactataaaacctgttaatagaattattatatgaaacaaaatcactttcattatcagcttccatagtctagaaaaattaagtgttctaccttctaataccttcaaaagcttagcaagaatctaggtttttgttagaagttttgatcaaattaacgtatagtagaagtagagccaaaatttcaaaatagaaatgggaggattctatgacagtagaaacagtcggcgttagttttttgattctgggggtgtttttacttatcggaaaggctatccgctacaaggtgtcttggatcagtaacctcttcctaccaagttccattgtgggtggcttccttgccttgatcgtcggcccgggagtactcggacctgtgttaaaccaattcgttagcccggactcattctttgctaacggcctgatcccggattcgatcctagaagtttggtccgccttaccaagtatgtttattacgattatatttgcttctatctttttgggtgattcagtcccaagtattcggaaaatttggaagatagccagtcctcaaatcttaatgggacatgcagtctcctggggtcagtatgtaattggtatgctgttgactgttcttgttttaactccttttttcgggatgaaccccttggcaggggctttaatcgagattaccttcgtcgggggtcacgggacagcagctggtttgtccaataccttctatgacttgggctttccagaaggggcagatttgtcactagggctagctaccattggtgtcttgaccggggtaatcgttgggatattcttgattaattacatgcagcgtaagggacaagctaagtatgtcgacgcggaggcaaccgaccaacgacgcgagcaaataggggagtcccatggtttggatactgagccagaggtcattgaagccaaagccattgaacccctggccttccactttgctttgatagccgcggccattatcgggggttacctcatcctccaggccttgatctttttggaaaccctgataaggggagaggatgctgatatgattttcttctcactggttccttctttccctattgctatgattgccggtatgttgatccagatgattgccaacaaacttggctttgccaactatattgaccgaagtattattaataagatttccggttttgccttggacattttattggtatcctctttagccaccttgtctctcgacgttattggtaataacttgattccatttgttttactatcacttgtggctattatcttcaatatcattgctgtcatgttcctcgctccccggctcatccctgactactggttcgagcgagccatgggggactttggccaagccactgggatggcagcaacgggtatcttattaatgaaggtagcagacccccaagggcaaacgccagccatggaaggtttttcctacaagcagattttgtttgagcccttctgtggtggtggactggtcacctcagcttccatgccattgatcttagcctttggacctgtcgcattcttagtcatatcgattgttatgtttgccatattcttaatccttggctttgccaactttaaacgtttgaagcaggcttaataaaatcaaaaaaagcgcctcaattggggcgttttaatctatatttaattaaaatttaaacaaaaataatattgtactactgtaacatatgttgtagaattacttaaatcaaattagtcgttaaaatactttttggagcagttgtagatttaataaaaacggacaaataaacaaccagcaattatgtcaaacttcactgaacattgaaaacgttttatttgcttgaatctaatgcttgtaagggatggtgtaaaagggtatgaatagattagttttgaagattaagaccgttaaagaagacttccatatcataagttactatttgaatcctcaaaggtataagaatggagatagaaagaaatttctagaatacacttttttatagttaattttgaaaggaagatactgatgaaaaacagaaagttactaacaaggcttgtatctattttaatgttaatactgataatatcaattaattcacctgtgaatgctgaagtattaaagcctgctgaaggagggacgccagctttagaagaggaaaatcaatacgatggtattgcagttagaacagctcaaggtaaaaatttaaagattcctggagggaaaggtactctcacctcaaatgcatggcgctcgactagagagagttctgttggaaatacctatcagtgggattatcaagtttcagctgtttacagtggaaacaaaaaagtagaaagtattaaaacttcttggtacggaaaagcttcgctaagaaattcagcttctataaatctcggacttagtaattcaggcgcaactgttggagcaagttcaagttggaaaaatacgactactccagtgaaatattgggaaaatactaatggttcaaaaagttcggattataggagtaatttaatagtaagtccaagtaaagattatcgttcaaatacaataagtttaatgaataccgctagagtgaaactaaaaggcgatcccaaaccctatgttgtttcatctggggtataagcacacgatgtataggactcgattaatcgggtcctatctttttttataatgaaagagagtgactaagatgaaaaaaattggctatattatctgtttcatggtctttattctggcaggatgcagcaaaactatcggaaaaaatgaagaagtcttctataatccctatattcagaacttgatcacctataatggccaatcaaaagaagtagaactgtgggatccagccgacaaccaattgcagtaccctactggggaagcggatgtatatgttgatggaaattcgcaaacaaacgaatttattttaatgaaaatagataaatcggaaataactgagctttatgattttcctaaaaatgaaggggttttcccaattggtgaaaaagatgggactatttactttgtccattccttctaccaagaagatgggaaagaatatctcgataaaagaactctgtcagctctagacctaaatacgaaagaagtaaccgattataccaatgcagaggggctaatcgactacggtgtagtgggcgatgaagcgatttattatactgtttacgatgatgaccaagacttgtattccttaatgaagataaactacagtgatacgagccaaagtccagagactataaaaacaggattgcaggacggcatagtcctactagacggccaagaattgtattattcagatggtaaaaaactgatttctgacaaccatgaatttaaaaaagaatcggtcaactttttttaccaagggtcactctttcaattttatttaaatgaagaaggtagcttgagtcttaaaatgacaaacccgaaagatgacagtgtttacagtgaagaagatattgaaggcattcgtttggaagatgaccaggttaaaatctgcaagccagggcaagtgatcaaccatgacttataaagtaacactaaaaaatttaacaaagaagttcggttctcgcgtgattttaagggatttaaacctcaaatttgacaaagaccatatttacctgattacaggcaaaaatggttgtggcaagtcaaccttgctcaacatattatccaaatatgatacagattatgaaggagactatgagtcgaatgggcttaggattgcctatttattgcaagatgatttgttatttagaaatttaaccgttgaggacaacttgaacctgcaaattatggcagaaggaaaagagcctgatcctaccatgattaagattctagcaggcaagttgggtttgttagaccttcttgaccgtaatgtttcacaattatcgggaggagaaaagaaaaaagttgcgatagggcaattaatattaaaagaggctgacctggttctattggacgagccgactgccaatattcaaaaagaatacgcccaggatctaatcgattttatctatgaagaatttaaaggaaaaattctggtcatcgcttcccatgataaattaaaggaacccagggatagagaaatgataaaaataaaattggaagatgggatggcctattatggaatataaaatatcaaagatgatagccaataagaaaaaatatatattccatattatcatggccatctttatcctgatttctgtcaccatttccattgtagcttcctttgctttgtaccagtatgataccgccaagcaaaactttgttgataatcaatttgccaaaactattgaaatatcctcttacaatgaagcaggcaaccaggttagaaaattaaatgacaatgatattgacaagctagaagaacttctggattcaagctatgagagttatgaaattaccgctgaacaccttattccctttggggttcagacagctagtggggacgtggtttttgttaagtctttttcgggtgacttcttcctgaatgatttagtgacagacaatcatttaatgaccaagaaaaaggataacaattcgactttgactcttagcctccccgtcataaagactgagaatggaggctatagctccgaccaatcgattaaccgggaatacgacttagaccctatcgaagaaagttctttattaagcaattacatcaaagaagacgagcttattgcgtctgaagcaacttttaaagaaatactggatacgatgtttccagaggaagaatatgtcgatattgaaaaattgtatattactgttaattctgttgaagatgtcaggaatgtagcagctagattatcaagtaatgactataatgtaagccatgcttttgaatactatgatgatttagagaccagtataagcagattaatcactttaagtgtgctagtattagctatcttactcatctttacgatttgtttcttgaccggattatttgaactaatgttgaagaattccgtgggggatatcgccatcttgaaacatcttgggtactcaaaaagaaggatcggcaagatttacctctatccaatggtcgtcagaagtattattgcctttgttattattggtataattaataccattttatacctatttgacattataaatactttccaaagtttgatcattttccagcttgtgatcagcttggtgtgtgtcattgcattgggaattatgttcatgagaattagaaactatgcaagtaaaaatatcctttcactagttaaaatctacaaggtagaagagtgacaggaagtagattttgcactgttattggaatggatctgtggtgttattgaaactttagtcatagtcacctagtttggggacaatatcttgcttggtcaaaattgaccgaatcgtttgatatagctattatccactgggagggaactgtcatagttacctctttttctattaattgttatcgtttagctagttttaagcgaaataggctaatttaggtataaagaaagctctcctaatgatttccaaactccttttcatctggcaatcgtcatgtcagcaataaggttaagatcgtgctatagtaggggtaggaggtaataacttatgtataatgcaaatggtgacaacccccagcagggctttcaatggggaccctttttactggggatcttgtacttagttttagggattttagcctttaacaaccctgtcatttcgattgtttctattgcctatgtctttgctattggagctattattattggtttatttcaaatatttgcccgccgccggattaaacagttttcgacttacgattcaactgccctagtggttctaggcgtcatcgatattattatcggggttattttctttattaatattgcaaccgccatctttgccatccactttctttttgccttttggttgatcattgattcaattggtgctttggtttcagctggcccaattaaagactattccaaggctcaatattggttaactattgtggtcgctattattggtcttgtcattgggattgttttgatttttaacccggcaacttctttcttaaccattgccttgttgatcggtattttctttaccctgtttggcatcttgaatattgtctatgccttttaaaatgtttaaagcccaaaagcaacttttttccaagaggaggcagttatgaaattcggaaagaagagccaacttcctttctttttaatccttagtctgaccttagtggcttgcggaaatgccaacaatcctgaagaagacccagaactggaagaggccaattcagaaccagaaataagccaggaagtccccatccaaattagggtccaagtcgatggccaggaccaagcagacctaagtaaaagcctagaacttgaagaagaagcaagcttaagggaagtcatggatgagtactaccagattaaagaagaaaatggctaccttgttgaattagaaggaattgaacatgatcctagtaaggacaagtactggctattttatgtgaacgatgaactagctgagttcaccatggatgagtatatgcttgacgcaaacgatcagattgattggcgattagaataaaaccacaaacataaacgcgaaaggtcaaaaaaactgcccttgtctttagacagagggcagttcatttcatattgacttgttctacttattgttctaaagcttgaacaatacttctattgaaggcaggaaggtcatctggagtccggctagtgattaagccagaatcatcaataacaacttcttggtcaataaagttaccgccagcattgctgacatcaacgccaacttgcttaacagcggtggcatctttgccttttaagacgtcagcgttaaccaagagttgaggtccgtggcaaatggtaaagataggtttttgctggtcagcaaaatgacgggcaaagtcggtgaaacgttggtctcctcgtaatttatctggagaatagcctccaggaattaagagggcatcataatcagctggattgacatcatcaatgccttcatccagtgggtaagttttttcatctgtcttacccttaatttcacgtccagcttggtcaccgattgccacaacttggtgaccagcttcttctaaggcatgcttgggtgagaaaaattcagagtcttcaaataagtcggtaattagggtagcaacttttgccataattgtgtcctcctttacaattcatactaatcataacaaatttagcaagacttgcaagaatttcacttcatatctactaaaatacggtcagcgacaagcgggcagggcttgacatctttggctagaatcgctccagcttgctggagattagagcactagtatttgcttggaaggataggtaggttagtggagtaggtaggcaaaggggaacaactaattcgcttcaagcttaggttcacctttatttttattttggaaaggatagcggatgcctaagatgtgtttggcaatgcgggaggtgtggtctgatatccgcttcaagttagcgaccaggtcaataaagaggacactgtcggacggcttgccttcgcctttattgagctggtttaggtattcattccgtaattcatcttccagaatatcaatagcagcttcccgctcaaggacttggttggctccagcttcatcattgtcttggtaagattgtaaggcttgttcgatattgtcgctcaccatggtgaagagtttttccactttttcattatataaaatatcttcaggttttttatttttgtccttgtatttagggtagatgtcatggataatctgggcaatgctttgggagtggtccccaatccgttcaatatacttggtgacttcagtcatcttgttgtaatcttgagaatactggtcgggcatgtctttgactgacaaaagcattaagaattcggtgattttcccgtcaatgtggtccacaatgtcttcaatctgcatgaccttatcgtggtggtcatctttttttgaatggtagtacttgtaagtatattcaaattctttggcagcaaacttcccaatctgaccaatttcttttttgacctggccaaaagctatgataggggaggacttgatcaaggaccggtccatgtaagattcgtatttaggcaggtcatcatctgatcctggcactattttactgaccaacttggcaatttgtgggatgaaccagatcaggatgagaactgcaactaggttaaaaatcccgtgggcaaaggcaatttgcatttctggactcaagctgaattgttcagctaggtattcgattagggctaagtaggggttgaagactagcatgacaaagatagtggcaataacgttaaagataacgtgggcagcggaagctcttttagctgacaaactggccccgatggcagctaggactgcggtgatggtcgtcccgatattggttccaaaaacgaggggtagggcagcagacagttccatgctcccttgagcatacatactctggacgatcccagtggttgctgaagatgattgcatcaacatggtaaccactgtcccagccaagacacctaggagggggttggatgaaaagctcagcatgagattgttaaagaagggcatagactgtaggggctcaagaccagaactcattaattccaatccgtaaaagagggccccaaagccaaagacagtctcacctatgtagttaatccggtcttttttgaagaaaaagatgaggaaagcgccgactgcgataatcggtaaggctaactcgccaatatccaaaccgatgataaaggcggtaatggtcgtcccaatgttggcacccatgataattccaatggcttgctgtaaactcataaagccggcactaactaatccaatggctaaaacggtggtccctgaagaactttgaattaaaacggtgactgctactccggctaaaacagctcggatgggggtagaggtaaacttgtttaggatacttcttaaattatcaccggcagattgtttgagcccatcgcccataaattgcaggccgaaaagaaagatccctagtccacccagaaactggaacaacatgtcttgcacttccatttatacctcctatgtttgtttcgaacaataacgttaacaatcttacaagcctattttatcggacaaaggaggaaaaataaacggaaatcccatggtttattatgataatttattgataaataagcggtcaagataaagcaaggacaaattgatatagaaaatttagcaagaaattgataagataggagtatagaatttagaggagtcaatgccatgatcatattcctaattgccctaactatcttaatattggcaactttgatcagtattatttacatagaagacttggttgaccgcgactattataagccctttgtctaccaaacagctagcttagacttggaagcctttcatgacttctaccagcaaaagggcaatatctttcagtcttacgccagggaaaaatttgacggtccgggtgtttatgtgatctacaaccacagccaggacaagtattattttggccaaggggaccgggtgattgacagcatttatgaccggctgaccgatgaagctgaccaagaaatttaccaggccatctctaattttgatgacctctatgttaagatgatgctcttgagtcaaacgtcttatgaccaaattgatgatctcttggctgtcaccaagggagagtttacaagatagttgaggagaggaagttaggtttctagcttccttgcttttactttaacctggttttgattaaacaaggagatggaacatgtttcaaatattacaaaaattaggctggttttttaaactcaaacgcaagacttacgggatagcggtcctctgtttgatcttagtggcgattgcaacagctattacgcctatgattattgggaatattatcgaccaaatgaccgcagggacattaactgtacagaacttagtcatccagattgctattattttctttctagctattttaatgtatggcttgcgctatgtttggcgggctctggtctttaccaactcgacccacctagaagctatcatgcgtaaccgactctttgaccattttaccaagatggatagtcagtttttccaagactttcggactggagacttgatggcccatgcaaccaatgacttggccgcccttaaatttgtagctggtggcgggatcctaaccctggccgactcctttgcagtcggggtcaccaccttggccagtatggtcttgtttgttgactggcgcttgaccctctttaccatcgttccctttccattccttatgctaattggacggaacttaggggttattatcaaccgccgttaccgcaaggccttggagtccttctcccaaatgaatgaccatgttcaagaaagtattgccggcatgcgggccattaaggcttttggggaagaagatagcgattttgaaaatttttcggaagatattgatgaagttatttctaccaacaaggcggttaacaaggtcgatgccctgtacagcccggcgattgaaatgatcacccagtctgcctttatcctgacccttatatttgggacctattatgtcatttcaggccggattaccattggggaccttgtcgcttacttctcctacctgtccatgatgacctggcccctccttggtctaggtcgcttggccaacacactagagcggggaaatgtctcctatgcccgaatcatcgaactcttgtccattaaatcgagtattaaagaagccgataaaccagttgaccaggccttgggtggggacattgattttgatatcaagtcttttaagtaccaggacagcgacgaccggccagcattgaagaatgttcaattccacttgaaggctggccaaaccctcggcttagttggaaagacaggttctgggaaaagtaccatttttaaactcctcatgcgggactatgaccactacgatggccagatcacctatgatggcattgatatcagggattacgccaccgataccctggcccaagggattggttacgtgtctcaagagcctttcttattttccaaatcgattttagacaatgtccgctttggggcaccggacacccctaaagaaaaggtggactactataccaagttagccaatgtctatgaagatatcctggacaccccccaaggttttcaaacccaggtgggagagaagggtgttgccttatctggtgggcaaaaacaaagaatttccatcgcccgtgccctaacagttgaaccggaatttttatacttggatgactccctgtcagcagtggatgccaatacagaacaccagattttacaaaacttcaagaccttaaggaaaaaccaaaccaatatcatttctgctcaccggatttcgtcagttattcatgctgacttaatcttagtgattgacgatggcgaattgattgacaagggaagccaccaagaactcttggaaagaaatgaatggtaccggtccatgtacgaaaaacaacaattgcaactagaagtagaagaaggaggcggtgaccatgagtgaagatagacgactttcctttccgatcaaggtcaacttccaggtcctctggcgcttgctcaatttcgccaaacctttttggaaagtgtttgccctagccgtcatcatgatggttttggggtcagctgtagcagcttccttgccgatcatcatccaacaatacattgaccaatacctggtaaccgcttctgtgacctggaccattacccttcgttatgtcctcttttacctagtcttggtggttagccgtggactcttgacctactattcaaactatttatttatgaactcatatgaaatgtcagtagccaatttgcgtcgccaagtttacggcaaggtcacccgactagccatgcggtattttgaccaaaccccctaatgggtcgatcgtgtcacggattaccaatgacacggaaaccattaaggaattttgggctgtcttcttggaatttgctgatggcctctttaacgccgtagctattgccattgccatgtttaccctggacgcccagtttgctatgatttttgtggcaactatccccattattatcttgttgatgtatgtttaccaaaagtattcgactgttatatatggtcggatgcgggaagccttgtccatggtgaacactgagcttagtgaatcaatttctggtatggatactatccagcacttcaaccaagaagaacggaagaaagaagagttcgatgaagttaaccaaaaatatgttgatgccagaatccgtatgtttaaaatgaatgctgtattactcatgccggctataagctttattgaatccatggtcttagtggtcttgttatctgttttcggctaccaatttttcaacaactttgccgtcaatgtcggggttatttatgcctttacttcctatactcgggccttctaccgcccaatcgggaacatgatcaacagcttgtctatctatcaagatgggatcgtctccggttaccgggttatccgccttcttgaccggactgacttagcaccaacagctggcgaccaggcccagggggagattacagatggacatattaaactttctcatgttactttctcctatgacggggagcgggatgtcttaaaagatatcaatatcgaagccaagcccggccaaaccattgccctagttggtcagactgggtcaggcaagagctcgattatcaacctcctcatgcgcttttatgaattcaaccagggcgagattaccattgacggtcagtctatccgtgatatcaaagatgaagaactgagagaaaaaattggcctggtcctacaagatagtttcttattctatgggaatatcaaggataatattgctatgtttggggatttcagcgaccacgagatccgccaggcagctgaatttgtcaatgctgacaagatcatcaaccagctcgatggcaactaccaggcccgggtcattgaaggaggagcagccttctcaactggtgagaagcaacttttaagttttgcccggaccatcttgcgccaaccgaaaatccttatcttggatgaggcgacggccaacattgacactgaaacagaagaaatcatccagcatggtctccagcaaatccggcagggacggaccaccatcatgattgcccaccgcctgtccaccattaaggatgccgaccaaatttatgtcttgcgtcatggggaaattattgagcaaggcaagcacgaagacctgatccgccagcagggaacttactacaagatgtaccagttgcaaacttctgaccagtaaatttatattcactagaccagtaagtgaagtcagcctgtatcagctaaaggggtcttcattttatgggactatagggtcaaaaagaccaggggaaacctggtctttttatatcggctatgtaagggcttatttaaatcattttgtgtctattaagattgaaattagataaatgaatagactgttaaatgttttagtggtatagtaggttctaaataaatctatatagataggagtggatcacaatgagtaaaagagcaagagatgttatcatcgtaggcttcgccctttttgctatattctttggggcagggaacttaatctttcccgtttacctaggactgaatgcaggtgataactggtttagctcgatggtaggttttattttaaccgaccctttcttagccatcttagttgtcattatcacggcaaaattaggtggccaggctgaagacattggaaggagggttggccccaactttgcgaaagctctgggcattatcgctattttgtcaattgcgacctttgttgctgtacctcgtactgcagcaaccgtccatgagattgcaatccagccgaactttcccaatgtttcgcccgttgtgacctctcttgtcttctttgccatcaccttgtactttgtgattaatgaaggtaaggtcattgacattatcggtaatattttaacccccattttaattgccaccttggccatttttatagtctgggtcattattaaccctcctggaccaaccgtccccagtcaaattgaaagcagtgacttcctagtcggctttaccgagggctaccaaaccatggatgccttaggggctaacctgatggccgggattgtggttactgacttagtccggagaggttacacagacaaggaaaaacgttataaaaatacaattggggtgggcattattgcctttatcttacttagcctagtttatggtggcttggtctatgtaggggcccgtttctcagctatctacccagttgatatgtcccggacccaactgctgattgctagtttctcttacatttttggcgactttggagcctttctaatttccgttgttgtcactctggcttgtctaaccacttcagttggtttgaccgcaacctgtggcgactatttccagactatttccaaaaacaagttgaaatacagacctattgtgattacctcggtcaccatcggcctgctgatttctctcttgtcagtcgatgagattgtcgccttcaccggtcccttgctagaccttgtttacccggtcgtgatggccttggcccttttctccctctttaacgaatacttgaaatatgacttgatcttcgttggaggcgtagccggagcctttgctgtagccttaatagaaaccagtttaggcctgcttggcatggatgctgccctagaaagctggaccgcctttgttcccctagctgaagttggttttggctggttgatcccagctttaatcggtggtttaattggcggactcctaggtcacttctttgacttgggtaaacgcttggaagaccatgacaaccagagagctgtcctgtcagagacttcctacacataagtaattttaaattaaactataaaaaagacccctagcaatcatcaatatggttgctaggggctttcttttgaatttagttagagtgaatgctactcagactggtcgccagcctggcccagccagtaggtccctataaagcaaagggctagtaggagaccacctgtgctgacaaaacgaatcatttggtcaactggtaagctagacagggaagcgattgcccctgtattcaataaaatcgcaatgggggaagctaggactagaccaaatattccactgtaagttagaacgggttggttggcaaagaggtattcaatgattttactgatcaagaagataccgactaagacaccaaggccaaaaggaatgaggagggctagaccgtggaggatgccttgtgtatctagacttctcaaggcatcaaagaagttggttaaggtattgataatattataatagtaacccaaaatcatcaggaccaaggaaccactgataccaggtattaccatggtggctgctgcaatcaagccgacaaaaaataaaatggcaagattagctaaagtcaggtctaaggcttcaaaggtcacgtctgattcttggtaaaaggataggaccacgatgagggcaaaaaagagggtaaagacgactagctggctccagccaatggattccctttcagtcttcaaggtatgagcgaactggcggagtaaaatcggaaggccacctaaaaccaaacccacaaaggccatggcagtggggaaggtatattggctcaagaggacctcaatagcgtatgaaaaaaagacgatccctaaaaggataccaagagctaggggcaatagaattgacattgattttttaaaggcttttttcagatgggtgatggcaaagatcaagtcatcgtaaatggctaaagaaacagccatcgttccaccactgaccccagggattaaattggcaaccccgaccaggattcctttaataaccatccaaatataagacataagtttcctccatcaattatcgttacttgaataagttcaagtttactctaattagcctagcttatcaattacagtttgcctgctttgcaatttttataaatttctttatgattaaagtatgaaatgataggtgatgaaaaatgcgcgagaaaattttccaaattattagtgtccaagatagcgactcccttgctagcaaggcctataatacggtcaatatctttttgattttgatcagcttgctgcctttaatgtttaaaagtcaagatcccctcttacaatttattgataacttggtcttagttttttttattgtcgaatattttcttcactttattacagctgatatcaagtatgatgacctgcccaagcaccaagccttccttcgctacccagtatctttttttgggatagtcgacctactctccatcctccccatgatggaatttgtctcttcctctttccgactcctccgtctatttagactggtccagtcggctagggtttttcgagtctttaaaatctttcgttactccaatagtattgatatcttaatcaaggccattatccgccaaaaagactccctccagttagtcttatggactgctgttttatacctactaattacctcgcttttgatctttaatatcgaaccagaatcctttccaagctttatggatgctctcttttggtcagccggagccttaacatcggcaacttttggggattactttcctagcagtccccaaggccaattgattggcatcttgtcctttatggtcggagtcctcatcattgccttgccttccagtattattacggcaggctatgttgacgaactcaaggcccacagtaatatagaggaccaaaacggccaagaacaagaagacgagcaagcacaagaaaaaagcccagaccgatagcctgggctagacttgaccgactaagttagcaaagtggcgggttaattgggccgtcaacccccacaaggtagcctctttaaattcatagaaggggagagagctttgggaccgaccccttttgtaggctgtttcgttgatagacttgaatttattgctggggaagttgcgttcgaattggctttctacattgtaatggtaaatttctggggcattgtcgataaaatattggaccggtttaaaaaagatactgtcgacttcgtagcggttgatctttaactggtctgggtcaaagtcttctaagatcccaacatgacagtagaccatgacccggccattagcaatccggtcaatttcacctaagacttcaattttttcaacggggaagccaatttcttccttggtttcccttagaccggcttgaagggggctttcacctttttcgatccgtccgcctgggaaggagacttcgcctggttgagaaacatattggctccgtatctcgtataaaatctgccactgcccttggtagtaaacgaggggaaggaggacagacgactcaaacttgtagcccaaaaacttggcccggtggtttttaatttgcttgcggatatgattaatattagtcacgctttgacatcctaactataaaaagttcactatcaaccttattataagtagaatgcctactttttgaaagatccttgcttacgattatataaaacgttatttatatctattttagtcaaaagaactatagaatttgctatcttgttatattatgttgtacaatgaacttagattatgaaaaggagtttgattgaaatgacttcaaaagatgaattaaaaggaaaagccaaagaagcttacggtaagcttgtggatgatgacaagaaaaaaagtgaaggcaaaacggaccaagtgaaaggcaaggtcaatgaagccaaagatagtgttaaagacagtttggaaggtgtcaaagaaagcctaagttcagacgataaagacgactaatcctttaacggtttactagctaatggagggacttgacttaggataaaaaccaaacccaattaccagttaaactgtaacctgtcacaaattttagacccaaacctaggatgtttaaaaccaggattgggctagaggcatccaggctgagttctggatgccttttatagtaaattatcgaaattttaagtcttgtcgtaggactggtccaggtcaaatgttaaaatcacattaaaaataccctgacttttgtaaaggaattgatttaatgtaaaattactgttaacatgatgacatcaacgaaataggaggaatgtttcgatgaaaaaatggactaagttgttatcaattcctgtagcagttactctactcgcagcttgcggtgacaatactgctcaagaagacccagcagaagaccctacagtagaagaaactgctcctgaagaagaagcagggattgaccaaactgctgaagacgacatgaacgaagacgacacaactgaagacgacacaactgaagatgacacaactgaagacggcacagctgaagacggcacagctgaagatgacacagaagacgatacagcagacgctgaatcaggtgcttctgtcatccaaacagctgatgaagctcaagatgctatgtcagctgatggggaatggattgttgtcctagaacaagacctacaagttgatgaagacttgacccttgaagctcaagacaacgaagaaggcgaacgtaaactagctttctacgatgacgaaggcgatgaaactcaactttacaccctaacagttccatcccttacaatcgaagctgaaaacacccgctttgctggccgtgttgaaggtgacgttattgtagatgcagacggattctcctttgaaaacgatcctgaaattgatggtgacttgattttcacaagtcaagaattccacgattcagctgactttgacgaagcttctgtaactggtgaagtcattattgaagatggcgaaggaaccgaggaccaagctcaataagatcagtaattcatttaactttaagaggctggatttttccagcctctttttatgtctgatttttcacttttttggggaggaaagttctctattctttgtttggtgtggtagaataaagaatattgtaaattttatgttaaatgttttttgatgggctagatccctatgaaggagagtggaatgatgttttataaggctgatcacttgggaagattagaccactttacagccagacacttggccgttatggcggttgtcatggccttaagaatagccctgtcgcttattcctgccttgaatattgctaacctagttcagtggggctttggttttatcggaacaggtattgcggcttccctttttgggccagtttacatggtcttatttgctgttttatatgacttgctggacagcctgattatccaagcaagtacagtctttttcccaggctttacggtgagtgccggtttggctggccttatttatgctgtctttttatggcggaaaaagcccacccttaaacggatcggcctagcaactttccttgtttctctttttatcaatattggcttaaacaccatttggctcaaaataatgtatgatgaagcttggcgtgggctgatcatcccccgaattgtcaagaacgcgatcagcttcccactcaatacagctattctttatttcattttaaacctgccgtcgatccgaaatgttatcaagaaattccagttctaagtttggctaagtttcgctttttattttaaaagcttaatttcttacttgctccgataagggacccggtttggctaaagccgagtttggtgtacatgacccccacgctatcctccccatctgccagtaagataaggtccttatcccgacttttggcatagtcagcaacctggttgaccagggtgctggctattttttgatgccggtaattggggtggacatagaggtcatcgatttcaatagtccgatctttttcgatttgaataaggctagctatgatttcttggtccagctggctggtcaaaaagtcaatgccaggtttagcaaggaggtcatcgtagaaattcagcttgctttgagcaaacgcttttgaaacatgttggtcatgctggtagttaaaggacttaaaggccccaagctttttactggataagacttggtttttaacggcaaggttagatacttggtccttaaagtttccgggctttagccggtacaaatctaaaagctctagcccataatcttccttgttcagatattttgtgacggatggagttaggggagtattttgaggccaatagaattttaaatgacccagcttgttttgtcgatgggaagcgatttgcatctcttcaattaatttgaattcctggaggtccggttgaaatttcaacaggaaaaaattagagtcataccgccaaggataatcaggggacaggtattgggcaaagaattcattgtcatcgaccagctggctgtggtgttcaaaatcagtaaattggtacaaggaataagccttctttcgctcgcttttttacaaaaatatggacaaagttatcattgagaatgttactaatgtgttacaagaaactaagaatttgttacttaatactaacagagccctagcctactttatgatatcataaaaattgtacttaggaaaaagggcccttgcagccgttaaggacctactgttaccccctaaattgtcaagtaaaggagattagatattgaaaaaagaacagattcttaaattactggccactagcttagtcggcagccaagtgtttttcgcttctcatcttgtccttgctgaagaagctagttcccagctcttagaggaactgaggcaaagccgtcaagacttggaccaagaaaatgcccagcttgaatcggaaataaagacctctaaagatgaaatgtccaatctttcccaagaaaaggcagatttggaagaagagatccaagctatccaaagcaatgtcgatcaattaatagctgaaattgaccaaagacaagaggagatccaagacaaggaagatcaaatcgaccaattacataaggaaataggcgaattgaccgaattgattgaccgccggacggaaaaagtggctgaccaagctcggtctgtccaaaaaacgggggacgtgacctcgattgtccatgccctcctgtcttcggatactgttgctgaccttcttaaccgacttcactttatttcagaaattatctcttccaaccggtccatcatctctgaccaaaaagctgaccatgaccggctaaaagccagccaagaaaaactggaagcagaagaggcagacttgaaggcggctaagtgggacttggaagtggcccaaaataacttggtcaaccagcgacttgccttagaaagccaggtcagtcaagtagccctagcttatgacttaaaccaaaaagacctggccactttagaagctaaaaaggatgaaatcgcccgccagactagccatttagaccagcaagttcaagctgagcaagaacgtctggaagaagagcggcttgagcaagagagactagctcgagaagaggctgaacgccagcgtcaacaagcggaagaagctgagcgcattcgccaagcagaagcccaggctaaagaggaggccaaagcccaagccaaggaggaagccgaagctcaagccaaatctcaagagagccagcaaggtcaagcggaagaagtcgagcgagaggtcgaagaagaaaatagggatagagaggaagacgaccagcaagcttcccagcttgaaagtagcctgacagggcaaagttcagcttccactgtagttcaagcttctagttcactgaatccctctggctgggtacgacccgcaattggccggatgacatctggctttggttaccgcctccacccaattaagggctatcgtaagctacatgaaggaatagacattgcaggaagcggaccagtgcgggcgtctaaagccggccgggttatcgttgcatcgtatacggctggtttgggttaccacgtccgcatcgaccacggcggagcttaaccagtgtttatggccacttacagccaagtttagctgttgcacccggccaaactgtttcccaaggtcaagttataggccaaatggggtcaactggatcatcaactggggtccacttgcactttgaaatccggcaaaatggctgccccgtcaacccaatgaactatctttattaatgaatcagttatacttgattgctcccacgccaactagccaggccctggccagctggcgtggtttttgttattttagcttggtaatttaataaaaactgttattattaaactttaggccaagttcgagaaatttatcccagaattctcaaacaactaatgttattcgagaatcccggcggctttttctcaaacaacaattgttatacgagaatagtccaagttttttctcaaacaactatcgttatatgagaatttaaaacccccacgtttgagttaagacctccattttacaaataacaactaccaaagcagaggctagcagcctttagccctaaccgatctctagcgagtcggcaaccagccacccaaccaccggctagctggttacaggacccttctgaacacccgttaaggtcaaagttttttgcattgaaggagtctggcttaagaaattgagcttgacccttgccaggccttgccaaagatgatttactaatattaaaagtattgaaggagtcaaatatgattacttcccggaaaaacccccaagtaaaagattggatcaagttgaaaaccaagaaagagcgcgaaaaacgccagcttttcctactagaaggctaccacctgattgaagaagctatgagggcccaggaggatgttaaagaaattattggaacccaagcagccttagaaaattacaccccatcccggcaagatatccccacccacttggtcactgaagccatcagccaggacatggctgacacaaaaacaagtcagggaatttttgcggttgttaggcctaactaccaagccaaaagaccccatcaaaaagtccttttgctagaccaggtccaagatccaggcaacctggggaccatgatccggtcggctgatgcagctggttttgacctggttgccatgggaaaggggacagttgatgcttataaccagaaggtcttgcggtccgcccaaggaagccattttcacttagacttggccaatgttgacttaaagagctttataccccaactccaagaccagggactggttgtttacgggacagacctgtccgctgagtctgttccctataaagagctcaaaactagtggtaagattgctgtggtggtaggaaatgaaggccaggggatggccccggacttgctgggtttggtggaccaaaacacccatattcccatcaagggccaggcagagtcactaaatgtagccattgccgcttcaattttaatgtttcacttttctgaataggactaggctagcttcttcattcacatgacttgaaaaaacttgccaaatacggcttttttgtaacaattaatctttgaataatccccttctttacgctataatgaagaagcttgatagcaatagatgtcggttgtgaagttttttgaagggatgatggaatgcctatttttgaagatagatggaaatacgatcctgaatatttatcctatgtttcagacttgattaataatgataaatttaggcagttggacaaaatcgtccaccaccaccataccacccggtttaaacactcggtctatgtttcttatgtgtcttaccgaattgcgagacggatgggcttggatgcacgtgcgacagcccgggctggccttttgcatgatttcttcttagaaagtcgcgaagatatccagttgatgcaagaagggtcgcataatgatgtccaccccaaaattgccttgaaaaatgccttaaccttgactgaactttcagacaaagaaaaagacattatcctaaaacacatgttcttgtgttccaaatctaacttcccaagataccgtgagagctatatcgtcacttccgttgataagtattgtgctatggacgaagtttcccgtcctttgcggagtcgcgtgattgccaaataccactccttaaaaggtgccttatcaacccaggcttaagcaaggatgtggctagcaagttaagcagggtggtcggaccgcttgatacttggacagttaaatataaggtctagccttgcttatcttctttactaaagcaagttatgcgagaaaacgacagccctaaccagactgtcgttttctatttgtggctaaactggtcactgacagaatttgtgactgggccgaggaatccatgaatgagaggtagcgaaatgacagactatttagaatttaacagagaaaattactataaagatatcatcagttccatcgaaaaggaaaaacaggttacctttaataaactttttttgcgcttgcatgaccgggataaaattgaagtgttcaacatggtggctgatgactacaagaaaaatattgccaatctacttccggcagaagattttgaagatatgtttaaaattatggctatcgaagaccaggaagtggccgttgccaaccttcctaatgactacctccggcaagtttttaaccacctaccttatgatgacatagcctacttcatcaaccggtctagcttgtacgatgacacctttgtgttgaaatacttggatgctgaccggcaaaaagaagtcctggagatcttatcctatgcttctgagactgctgggtcgattatgactaaggaatttatttcggtctatgaggaccaaaccgtccaacgggtgattgactacttaagacaggtaggccaagatgctgagaccatttacaccatttatgtggtggatgaccaggagcaattgaacggggtcttctccctgcgtgaattgatgatgtcgcccaaggacaagttaattgccgatattatgaacacccatgtggtcagtgccagtgttgatacggaccaggaagaggtggccgtctacatccaggactatgacttgacagccctcccggttatttcccatgacggtaagttaaaaggaattatcacggttgatgacattattgacattgtggaccaagaagcggaagaagactttaacgaattagccggtatccggaaacaagatacccatgatgaaaaagggaagcaaaaatcgactatccaaatggcactcagccggaccccctggctggtgatctttatggtgaccggtctattgattgggagtttgatgaacctctttgaaaataccctgcagcgggcggtcctcttgtcagcctttgtcccagctataatggatacggctggtaatgtgggaacccagtcactagcggtaactatcagtagtaataagctttttcaaagtagtataggtcagaagttgttagccttaaaggatgaaatcttaactggcttgattatgggggtcatttcagccctgatgatgtttgtcattatttgggtggtttatggtgaagccttaattggccttatcgttgccctggccttgattgtgacaattaccatctcgactggggtgggactcattgtccccttgttttttgataaaatcggctttgattctagcgtagctagtggaccatttatcaccatcatgtcggatgcagtcggtttggttttctacttttcaatcgcgtcaatttttataggctagggggataccatggaatcacttcaaattaacaaagaccgttactatgatgacatttacaaggcttttgacaatgatgaccgggaaaccttccgcgagctcttcttaagactccacgaaagggaccagcacgagcttttccacctgctttaccccgagaagaaaaagaaaatagcccaattcctctcagccaaggaatttgccgaaatctttgaatggatggcggtggaggacaaggaagccgtgatcaataacctgcctcctgtctacattgcagaagtctttaacaacttggccaatgatgacgtagtggaatttttgacccaaagccaagcaactgatgccgaaaaaatactggacatgatggaccaggatgaacgtaaacgggtccaggaattgatgtcctatgcccaagagacggccggttctatcatgaccaaggaatatattgctatccaagattcccaatcggtaagacggtcttggaccgcttgccgaccattgcggatgaagccgaaaccatctactacctctatgtgcttaacgaagaaggtcagctggtcggtgtcctttccctgcgtgatttactcttggcccaagaagatgaattagtccggaatatcatgttcaaaaatgtcacctcggtccggatcgacatggaccaggaagaagttgcccatgttattcgagactatgacttactggcagttcccgttgtcagccacgatggccggatgcaggggattgttaccgtagacgacattatggacattattgaagaagaggctaatgaagacttcatagaatttgcggcgattagaccttctgacagtgaggagaaaaggctcaaccccatccaagccaccaagcatagaattccttggatcttgattcttttaatcttaggtcttttaagtggtggcgtcatctcctactttgaagagaccttggagtctgtcgttgtcctagcaacctttatcccaatgattatggggacggccgggaatatcggaacccagtccttggcagtagccattaataacttgtctggtgacaagggcgaagatagcaagaagatgatgacggtgatccggagggaagtggtaggaggagccattattggactcttcttagccttgattttagttgccttatcccttattatttatcaaaatactgtcttagccatgattgtcagtaccgccatctttttaaccacgattttatcgtctacagttggggcggtcattcctttgttatttgaggaaatcaatattgaccctgccgttgctagtggccccttcattaccaccatcaacgatattgcatctcttttgatctatttcaggctagccgtcagttttttggaacatttataaaaacaattttagtttactttaatgaagcttttagttatactatccttaagctagattattggagaccaatcgtatcgataacatgcaagttaggaagtagaggcgattatatggtagtaacgaaaagtgatgagtctccatctatctgtcccaaatttgagtatactttttccatcctaggtaaaaaatggaacggcttgattatcgatgccttgctcgaatcccccctccggtttaaggaaattgcggcctgtatttcaggtattagcgaccgcgttctggttgaccggctcaagggcttggaagaagaaggcattattgagcggaccaaggtaggccattgtaatggctacagcctgacggaaaagggctatgacctagaacccgtcatgacccaggttcaaaaatgggcagataaatgggttttagatgaagatatcgaagacttgtgttagacttacatgcaaaaaagtaaatagaaaaaaatgacggatagaaaagagtatccaggtggctgttacagagaaagatggcttagctgagacccattttacatcaagcttggagaagttcacttctatcatatgctgattggcatattcatttgtttcacaaaaaagttgagaccggtatacaccgttatgtaagagtgcaaactaggttagcttagtttgaactagggtggtaccgcgaatggcctcgtccctttatgggcgaggccattttttgtggccaaaaagccaggccaagtaaaaatgtagcaaaggagtcgcatatggatttacaagaaaaattacaggacttgcagcagcaggccttaaaagaaattaaccaagttgaaagtttagaccagttggagtccatccgcctgtcttacctgggcaagaaggggcaggtcacccaggtccttaaggggatgaaggacttagaccccaaagaccgtcccttggtagggaagactgccaatgaagtaagcgatgatattaaagacatggttgaaacgtccaaggaccggttggaaagccaggccctagaccagaaattggcagaagaaaccatcgatgttagcctgccaggccaatccagtgagccgggccaaacccatgtgatcctccaagtgattgaagagttggaggacttgtttattggcatgggctataagattgtggaaggctatgaaattgaaaccgaccactacaactttgaacgggtaaatgttccgaaagaccacccggcccgtgacatgcaggatactttttacattgacgacttgcacctactgagaacccacacctcccccacccaaccacggaccttagaaaaacacgacttttccaagtcacccttgaagatgattagtgtgggcaaggttttccgccgggatactgatgatgctacccactcccaccaattccaccaaattgaaggtttagtggtggacaagagtatttccctaggggacttgaaggggaccttggaagtcatggccaagaaaatcttcggcgacagccgccagatccgcttgcgccccagttacttcccctttaccgaaccctctgttgaagtggacttgtcttgctttaactgtgacggcaagggctgcagtatttgtaagcacaccggttggattgaagtcttaggtgctggtatggtccacccccaagtcttagagatgtccggggttgattctacaagctatagcggttttgccttcgggattggggcggaccgaatcgccatgctgaaatatgaagttgacgatatccgtcatttctacttaaatgaccagcgtttcttgagtcaattcaaagcgaaagggtaggtaaagatgaaagtatcatacaattggttaggacaatatgtcgatttaatcgatatttcaccagaagaactggccaagcaaattactttaacaggtatcgaagtggagggagtggaccaggctgaccccattccaaaacttttagtgggccatgttaaagattgccagcctatagaagggtcagaccacttgaaattgacccaggtagatgtgggacaagctgaccccgttcaaattgtctgcggagctcctaatattaaagcggacctcaaagtgattgtggccttgccgggagccgttttaccaggggactttcaaattaaaacaaccgctttgctgggccaggaatcagcagggatgatttgttcactagaagagctaggtttcagtgaatcagtggtacccaagtttgcggaagacgggatctatatcttgcctgattcagcccaagtgggagacccagctggaccttatattggcctagacgatgctgttattgacctggatgtcactcctaaccgtgcagacgctttatccatgcgaggggtggcttatgaagttgcagctactttagaccgaccagtccactttgaacccgtccaagtccaggaggatgaaaatacggctcagctttccgttggggtggagtctactgacgatacacccttttatgctagccggattgtggaagacgtcaaggttggtgacagccccctttggcttcaaaaacgcttgatggcagctggcatccgtcccattgattcgattgtggacatcaccaactacatcatgttggaatacggccaacccatgcacgcttttgactatgatgcggtaggaagcaatgaactctatgttcgccgggccaaagaagacgaagtactccgaacactagacggtaaggaccgagacttagggccagacaacctagtggtcaccaatgggagccaggcaattgccctggctggtgtgatggggggcgaaaacacccatgtaacgaacgatacgaaaagaattgctattgaagcagcgatctttgaccctgttatagttcgtaaaacagcccagaaattaaatttaagaagtgaatccagtagccggtttgaaaaaggaattaatgaagctactgttattgaagccttggacaaggcagctgctttgatgcgggatattggtgggggtaaaattgtctcaggtgttgtcaaggatcgtgatctcactccacaagatacgcatgtgtcagccgaccttgcctatatcaaccgcctaagtggagtggactttagccaagaccaggtcggccaaattttaaaccgtctaggattttcttaccaggtggaagaggggcaatttgatgtggctattccaccgagaaggcgagatgtcagtatcgccgctgacctggttgaagaaatcacccgaatttacgggttacaacaaggtgccatccacactgccaaaaactgagaccatcccaggccagttaacccccggccaacggatgaaacgctatctcaaagattatatggaaaacattggtttctcccaggctatatcttatgccctgactaagccagaaaaggcaccacgttttgtgtttggcgatttagccgacaagcaagtggtttccattgcccaccccatgagtaatgaccgccaaagtttacgtcaaagcctcttgtccggtttgctcgatgtggcccaatacaataaggctagacaagtaaactcggtcaagttatttgaattgggttctgttttcggcaaggaccaagaagagtatttggaagaaggacgctttgccggtttattgactggacaggtgacagaagcttcctggagtcagaaggccaaccaagtcgactttttcactgccaagggaattatagagcagttgtgccaattgattggatttgctgccccggtcagttaccaggccaataaggacagagacaatatgcaccccgggcgaacagcggatatttacatcggccaagacctggttggttacttgggccaagtccatcccttgttggccaaggaatatgacctcaaggaagtttatgtatttgaactagacctagacaagctggttgctttagacaagaaagaagctgtctatgacttggttccaaaatacccaggcacttcccgtgacattgccctcctggtagacgagtccattagccaccaaaccattgtagacttgattcggtccaactcttctgatttgcttaaacggattcacctcttcgacctctacaagggcgataacatccaagaaggcaaacagtccctagcttactccctcttctaccaagaccctgcagctactctcaaggatgaaaaagtcgaccaagaattcgataaggtcaaacaagtcctaacagaagaactaaaagcagaaattcgttaaagtcaagctaaatatctagcaagctggtccactaggctttggtcttcattccaagttagctggaccagctttatacatatatgagtaaagttagctggagtgggacaaatactgggcggggactaagcattctctgttgaataaggattgcagaatgtcgggttcaaagttctacaattgtagttcgattgtagaatttcgggtttgaatttctacaattactgatcgattgtagaatttttggttcaaggttctacaattatagttcgattgtagaatttcgggtttgaatttctacaattactgatcgattgtagaatttttggttcaagattctacaattactgatcgattgtagaatttcgggttcaatgttgactatggacaattggtcaaaatagggaagttttgtagttaaaactggacaataaatcaaaataaggaagttttgaagttgaaacagtcaagtccaaatctatgtgtaaattctacaatatagtaacaggtgttatacggcggggctttttctttttccgtcggtcggcgtgatcggctaaacacaccgtttggcgagcggaaagagtgggcttctcttgaagcgagccagcggtgtgttagattacgccaagtgaccgagggaaaaagccccttttccagagggaggcaggttttaaaaggggtttaaaaagttcagcctatcgtaaaaatcgatagttctgagcttcccaattctcctgcaggtttaataagaccgagccggctagccgctctgcggatttgatattggggaaaatccccaccactctttcccgacgtcgaatttcacgattgactcgttcgatggaattggttgttctcaaagacatatggtaaggagaaggctccatttgatactgaatggcatcttcaaagccctcatctaatagactcaaagctttggccagcttcgcttggtcttcgaactccgcctccaaagcctgtttccgttcacgggcttcctgctgggttctggaaaataaaactgcttggaaacgatctcggatcactcggtccgtggttttcggcaaggcatcggtgatattgcttaataagtgaaaggtacagcgttgccaagtggtgttgacaaaacattcttgaatagctttccgtaagcctgcatgggcatctgaaatcaccattttcggcgtatcaatgcctctggcttttaaatcaagaaagaacgaccgccaactttccgttgactcttgcccagccactttaaacccgatgatttctcgcctattctcatcattgactccttgggcgatgtaaagggctttggacaccacccggttatcctctcggacctttatatacatggcatcgacatagatataccggaaatcagtatgggtgagggaccgcttttgaaagtgaaagacatccttgtccaggtgtttattgacatcggagacaaacgatttggagaccttttgaccacaaagggattcgacgactttcgtcattttgcgggtggagatgccattgacgtacatctcaaagatggtagccaataggccttgatccatccgctgattgagttcaaataattgggtatggaagtcgcctgaccgcgttctgggtacgttgagtttgagggtgccgattttcgtggtgaaatctcgctcataatacccattgcggtaatcgcagcgatcttcatctcgctcgtaccgcttgcttttcatatattggtcgcgttcggattccatataagcgtttaagaccgtcactaaggtggatttcatcacttgatccagatcacaatttaaaattgcgtctgttaatttattggcgtctagtgtaagattgagttgagtcataatgatcttcctttcaatgtgttttttgttttctctaactacattgtagctcaaaaaggtcattatgactttttctttttacacaattatatggactttatcccctaggcatcaactactgaccaaaagtaggggtggtaatgaccacaaatcatcccccataaagaagtttaggccaataggtgaaatgtcgaatttttcgtgttaaaataggaaagaaattctggtttaaggagcgatatcaagtggcagataaaccgagccggtacaaggccgtcattgatggcagaacgtatacaattgtaggccgtaagtcacaagaacatatgaagactgtgaccgaattagtcgatgctgaattagccgaattaaaaaaagtcactaagaacctcaaggatgaggatcgggccatcttgcttgctgtgaatactaaatcagaacaagttgaattgcagaaaaaagtgattcagctgcaagaaaagttggaaagtttaaatgcccaaatataaacggtagtgggggtcagtatgttatttacgttaatcattttgtttatctttatctatagtatttatattggggtaaaaagaggactcatcctccaattactgatgagtatcggcttttttatttcttacggagttgccatggcattacacgaaaatttatctacatatgttgaaatgctcgtaccctatccctcgccacttttaacagaagaaagtccctttgctctttacagccttgatttattgtttgacatggaccagcctttctatgatggtttgtcctttgttattttactcttccttggttggatcgtggttcggattataggtcgcattttggactttgtaacggaaatcaagttggattaccgggttgatagcattggcggtgccttgctgagcttttttgtccactatattggactcttcgttatattatttgtcctatccaccctgccctttgatttcatccagaaccagattgaatcatcttggctggctgagaccatgattaccaagactccggaattatcccaagactactatagccggtgggtggaagatgtggatccagatgcagaaacgtcctttgaccaagattaaggcaaaaaaggctgtggcaagtgtcatagacctttttttattaatcctcattatagagtttgagaacaagatagctaacaaggagcgaaagctgtgaaaacaacccaagaaaaatccattgaagtcctcgactttcccaaagttaaacaggaattaagccagcacacccagtctgacctaggtaagaagatggccttggccctgaagccctcaacctcattggaggaaataaagatgctcttaaatcaaactggggatggggtcagcttgctacggatgaaaggcgggatcccggtcaccccttttgaatccatcctgcctcagttaaaacgcttgtcaatcggtggggggctaaacgggggagagattgcctccatcatgaaaattatcaaaaatgcaagagagatcaaaaactttttcagagaggcacaagaagacgatattgtcttagaaaatctctatgctgtaagcgacatgctaaatcctttatccgatttgtccaaaacgatccaggccgtggtagatgaggatggtcgggtagtggattcggctagtcccaagctaaaggggattcggaccggtatcaagcaagtggagcagtccatccggcaaaaattggagaacattacccgggggagcaagtcccgttacctaacagatgctattatcactatccggaatgaccgctatgtcgtaccagttaaggctgatagtaaaaatgtgtttgggggcattgtccatgaccagagtgcaacgggtcaaactttatttgtcgagccccagtctgtcttgaaccaaaacaataagttaaaggaatataccagccaagaaaaagcagaagttgaccgcttgctggctgatttgtcccaaaagatcaccccttacagtgaagacctagagcaagacttgcaagttctaacccttttagattttattgcagccaaggctaagtatagccggcaattgtctgctagccagccaatcgtggatgataaccgggaaatcgccctctatggggctcgtcaccctctgatagatccagaccaggtggtagaaaacgacataaccctaggcttggactacaaggccattgttgtgactggccccaatactggggggaaaacggttgtccttaaaaccctcggcctcttgcaaatcatgggtcagtccggcttgcacttgcctgttaaagataatagccggatcggggtttttgaaaaatgctatgccgatattggcgacgagcagtccattgaacaaagcttatcaactttctcctcccatatgaccaatatcgtttcgattttaagtgacatcgatgaagccactttgattgtcctagacgagttgggagcagggacagacccccaagaaggagcggccctggccattgccattttagactatatctcggcccgggggtcaacagtggtcattacttcccactaccctgaactcaaggcctatgcctacaaccggccagaaaccatcaatgccagcatggcctttgacgttaacagcttgaagccaacctataaattacttctaggcatcccagggcggtccaatgcctttgaagtagcccaacgcttaggcttaaataatgaaatcattgctgcttcaaaacaattgatgtcgggtgagagtcaaagtgtcaatcaaatgatcgaagacttagaagcaaaacgtcaagcctaccacaaaagaaaccagtccttgcaaaaagaactttatgatgctagcaagctccacaatgacttgaagaacttttatgaagcctaccaagaacggtctcaagaacttgaagacaaggccaaggacaaggccaatcgaatcgtagaaaaagcccaggaacaagctgaccaaattattgacgacttacggcaaaagcaactcaaccagcctagtgaggacaatattaaggaacatgaatttatcgatgccaagtctcggctgtccaatatgaagtatgaacaaaaacacctgaaacaaaataaggtcttgcagaaggaaaaagagaaaaaagccttggcggttggcgaccaggtccatgtcgattcctttgaccaggaggggactttggttgaccagaccggtgattcaaaatgggtggttcagatgggcatgttaaaaatgaagatcgatgaagaggacttaaccctcctagaaaaagggaaatccaagcaggcaaccaagcaagcaaactccctccgggcaaatgtaggatctgttaaaactgagatcgacttaagaggggagagggttgaccaggctgtacatcgcctggaccagtatattgaccaggccctcctcgccaattatggtaccgtaactgtgatccatggtatgggcacaggtgctgtccgcaaggcagttaaggactatttaagtaagcacaagcgggtccaatcttataacgacgccccagccaaccaaggagggaatggggctactatagtcaagtttaaacagtaggcttcattttttgcttcagctgacctagttataggccctaaacaatttcctttaaagaaagacaagcatgtgatagactacaagtgtaagagaactggcaatatttttgcctaaggaggattagcatggttaaagcagtaacagatagtgattttaaacaagcaaccgattcaggcttagtattagttgatttttgggcaacttggtgtggcccttgtaagatgcagtcacctgtcattgaagaattagaagaagaaatgtctgacgttgaatttgttaaagtggatgtcgatgaaaaccaaaataccgcccaagaatttggcattatgagtatccccaccctcttaattaaaaaagacggggaagttgtcgacaaactagttggctaccacagcaaggaccaactgatccaagttttggaagacctgaaataaaataagtttttacttgcctaaatccccttggctagcccttttgatgggttgccgatggggatttttttgtggtctgaaccaggcttcaaacctcctcgtctgttttcttagcctggccttctagtatagcattaaggtaaatcttattagatagggtagatttgtggtaaaatgaagtgaagcttgcagaagggcggaccagatgtggaagtagcgattatcggttttggggccagtggagtcaatgtttttaggcatttaattaacaaccaagacaagctggctttaacaaaaatatacattatacaagatccaaaaaatcaatttgcaagggggcttccatatagagaagatcatgagtccatgcgtttgaacactcaaccccatgctgtttccatggatgctgacaacaaagaagaatttactgactttttaaagacccagggaatttcctattcaccggaagattttttaccccggcctctttttggtcgctatttaaagcaactttaccaagaagtcttatccctaaaataccccatgatccgagttcaggttattaaccaagaggctataggagttaagatcactggccatggttacctagtggacctagcagacggccaaagcatccaggtccaatccatccagctctgtcttggccaccttgcctacaatgacccctaccatttaaaagggaaggaccggtacgtatacaatccctaccctattctggataagctaaagaatgttcagtcacatgaccggcttgccatcattggggcgggactgacagctttagacttatttgtttacttaaaaaactacaaaaaatcagaaaaaatcgacctgttttccttagaaggcttggccaagactcctagaggcttgaattaccagcatgacatccagctcaactttgcctctaaaagccacttggtccaacttgcccaagcccagggaggttttcttacagctgaggacctttttgcccaattgcggcaggaagctcttcatcatgggatagaagattttgactacctctggcatgaccatgaaagtgggactttggaatccctagccagttacttagaccaggtcgacaaattaaatattctccaaaccatcctgatcgcctttaaaacaggactcaacccagtctggaaccattgcatgacacgagaagaaagaagccggttttttgaattatacggcgaccgttttaatctttacctatctcccattccgcaaaaccgggcccgcgaacttgtcaaagctggtcaagagtcctatctatctgtttatagtgacatggaggctgtccagcttgacccagatgggaaattcattatccaggcccaggggagggaatatgcttcctatgactacttggttaatgcttgcggacaggccaccaatattgaagacaagcttgacatgcaagggcctctagtccagcaattagttcaagaaggcctagctcaaaccgatcctctgggggggttccattgtcattaccctagctttagcttggttcatccccaaagtgggcctttagctagttttaaggtctatggccagctagccagtggtattgacccttttaacaactccatagaaaagcttagttatagcacaaaaatgggagttgaagacctggttcggacctggtcagtttcctgatttttattttaggaccagaatttgatatactgaaagtggcaaactatttagtaaaggaacatgattatgtatactgatgggattggctttattgattcaggagtgggtggcttcaccctggtcaaagaagccatgaagcaattgccaaatgaacaattttactatctgggagacaccgcccggtcaccttatggacctaaagacatggccactgtcaaggcatatgcctttgaacttgccaattacctggttaaaaaccaccagatcaaaatcttggtgatcgcttgtaatactgcgactgtcgctgccctcaaggacctaaaacaggccttgcccatcccagttttaggggtcatcttacctggttgccgagcagctattaaggctagtgttaaccatcagattggggttattgccacccatgggaccatccagtccggtcgctatgagcttgaacttaaacggaaacgaccggatattgaagtgacaagtctggcttgtcccgaatttgcccccatggtagaggcgggagactaccgatctgttcaagctagcagtgtggtgaggacatccttacaggccctagaagaccaagatttggatacccttattttgggttgcacccactatcccattataaaagacctcattcaagactctattggccctggtatcagcttggttgatccaggggcggaagctgtgaatgacttgagtgtcttattagactattatgacttgactaatgaccggtttaatcccaacctgacccaccatttttacaccacgggagataaagccgggtttaagaaaatcgcggatgactggcttgaccaccacaactaccgggttgaccatttagatttagaggagttgcaagaagttaatggaagataaagtgttgattattgccactgggaaccctggcaaggcagaggaatttaaggacctttttgccgaaagaggctaccagatcaaaaccctagccgactatcctgaccttgaagaagtggaagaaactggccaaagctttgaagaaaatgcccggctcaaggctgagaccatcgcccgccaggtcaatcaagtggttattgcggatgattctggcttgaaagtggatgaccttggggggatgccggggatctattctgcccgctatgcaggggaagacaagaacgatgcccgaaacaatgccaaattattggccgacttgggggaaatacaaaatgctaaacggtcagcccacttccactgcaccctagtcgctgcctacccaggttgggacagtttggtagtggaaggcgagctggccggtcaaattgctgacatgcctcgtggcgacaatggcttcggctatgaccccttgttttacttagaagattatggcaagacccttgcccaacttgacccaaaagaaaaaaacaaaatcagccaccgagcacaggccctaaaagcattagaccgggtctttgaccagtggctccaggaagaaggaaagtaagtgaagattttagcgattagtgacaaccatggtgacgaaacaattttggaacaagtcctctccatccacgagactgaagtggactcttttattcattgtggcgattcggagttgagtgatgtccaccccctatggcagcagtattcggtcgtcaagggcaatactgattttggccaagatttaaaagacggtcaggtagacaaggtggatgggcgttgcttctttattacccatggccacttgtatgacgttaaacggtcacgtaaaactttggctaaggcggctaaggaggcaggggcccaatttgctttttacggacatacccatattcccaaagttgaaaccattgaaggtgtccatgtcatcaacccaggtagcatcagcctacctaagggcgaatttccccatgggacttactgtattttagatattaaggatgaccagaccagtgtaacctattataccagggaccaccagccggttccggaattatcccaaaccctagcctaatgatccttcgtttagtatgaataaggagatactttatgatcaatgacaaaatccaagcctattttgtgaatgaaaaataccccttaatcaaggatggcgatgaggtggctgtgatccattcctggcacaagcttgaccacgccatgttaattttgacttctgatacctataacgtggttcctgtcctgaataagtcttcccaggtagtggggctgatctccatgtcacgtatcgtgaaggcggttgtttcaggagccgatttctcttttggagatcttgaccagtacactgttcaagaggttatggaccaggactttgacaaactggttttgggggaatttgacttggaagatgtcctccagcaactggtgtcgacttcctttttatgtgtggtcgatgaccaaggaatttttaaggggattatcacccgaagcaccatcttgcaaggaattaatcggcttgtccatgccattgaccaggactttgacttaagggacaagtaaaaaggctgagatttaaaagttgccccaggaatcaaactggttgatttgaccagttaaatcaaataaaaaatgacgctggtgaatccctcaccaacgttaaataatgtagaacccaaaaaagccaacccaatgctttggtgtaagcacttgggttggcctgtttttgtctctttaattttggtctggactcgggatatcaatcgtattggaaggaagttcaataccagctttgtttaaggccttcagcagggcttcatagaactcaaccatgacatcatattcttcgccagggacagtaaagataggaattctcagggttacttgtccgttttcggcggcctcatagataaattctggttggctgacaagggtggtatagtcttccatttttttatatgtggtttctctaacaacccggtctatggtttcgaaatcactattggcaaagaggcggataataatcatggcccgcatgttgtcccgggagtggttactgatgatatcaattttccggttggggatatagtgaaaagctccatctaagtctttgacgaccgttgtttttaggttcgtatcttccacaaaacctaagatatcatttatgattaccttgtctccaatatcgatttgtttttcaaagaggataactaggccgttcaccaggtctgagacaaagtcttgggcccccagtgacaaggccaaaccaatgaccccagccccggctaggagggagccaatagggacacccagtatctctaagacagtaaagacaaacaagaacaggataacgccgttgaagaccgagttggccaggcgtttgagggtcttccgccggctaggagactggcctttggcaaagctgcttcccgcaaaggaccggctaatcaacttagtcccaagccatttgacaataccgaagacgatcacagcaaataaaatttggagaaaaataagtaggagggctaaagcaatttcttgccagtttaagttttggaagtattcaatcacaaagttggtccgctctgtggtctcttccaatatttcactttcggctaaaagtgtaaatttcattttcacatcaccgcttactattatataatagaagcagttaaaaaggaatacctttaaaattttccttgaaagcaggttacatttgtaaaatattagctataatggtattctgataacataatattatagaaagaaggaataagaatgaacatgacagggtctgagcttgcagctttaatcgcggccattgcctttgctatcttagccattgcacttatttacttaatttttaaaattgctggcgttgtttctgatcttaacaatacagtagatgaagtgaataatagtttgaatgttattaccaaggatgctgaccacttgctcattgaaattgaagggttgttgaacaaaaccaacattactttagatgatgtcaatggcaaactaggcttgaccacccctctctttaaagcagtgggtgacttaggtgagtcggtttccaagttaaatgaatcgactgtccgcctcactgaaaaagtggctggcacggctggcaaaaaatagttaaatagttcaatcaataaaaaaggagcgatcgtctatgagtgatagagatagagcagaaggatttttaattggcactttagtcggtggactagtggcagggatatctgccctcttgtttgcacctaaatcaggtgaagccctccggaaagacattgcagaccaagctgacgaatggaagaatcaagccagtgactatgccagcgatgttaagcaaaaaggtcaagaattgtactctgaagcccgtcaaaccggtgaagacctggctaacactgccaaacaagcaggcaaccgctaccgggacaatgctgagctggctttgaacaaggctaaagcagaccttaaatccaatatcagtgatgatgacgttgatgtggacgaattgcttgactcccttcaagagacagctgaccaaaccttggatcgagacaaagacatcactgaagacatcatcaaacaagcaaaaaaagatgttgaatcctaattcaactatacaaaaagcttgtaggctctgtcctacaagctttttgttttttagtcagtcacggcaggtaaaaactgaaggtttttgggggattgtgtcagacttatggctccgtcttcattcagatagacacaatcttcaattcggactccaacctggccagggatatagatgcctggttcaatcgaaaaggccattcctgcctgcaagttactagtattcgatgaactaatacttggggactcatgggcggtttggccgatgccatgacccaatcggtggatgaagtactggccatagccggcttggtcgattacttgccgggccaacttgtctaagtcgccagctgtcatgcctggttttgccgcttccatggcagtttcttgagcctttaagactgtttggtagactgccttgtcttggtcatctaagtcttcaggctctccaaagaagacggtccgagacatgtcactggcataaccctggtagagaacgcctaggtcgaagaggacaaattcacctgcctggagtttccgactacctggcacgccgtgagggctaccagcatggtcaccaaacaagaccatggttgggaaactcattttagacacccctaattttttcatttcgtagtcaattttggctaccacttcaacctcgctgatccctacttttaaggcatttaagcctacttgtagggccttgtcagctaagtctcccgcttcaagcaagcggtctttttcttccttgcttttgattaatttcaagccatccaacaaactaccgatgtcaataaattcactgtcccttaagattccacttaaggccttgtacttgtctagggtgagctggctgtcttctactcccacccggttggggctgtcaaattggctgagcaggtctttttggataacctgccaggggtcttcttcatctttataagataagaccgggcaggagacctggtcttttgcatcctgggcatccaggtagggagcaaataagatatgcttggtcggcgaaacaaataaggccaagattctttccatgggttcgctagcatagccagtgaaataatcgatgagttgaggccgggtgatgagggcaaggtcaatgtcctggtcttttaactgagcttgtaacttatctaaacttgtcatattgaaccaacttcctaaagcatgttactactagtttagcacaagtctaaacttataccataatgatataagctgacaataacttgtgagcgatttctgaaaacttttcataaaatatgtgttactattgaaatagctagatttctttgctacattatgaatgaaaacattttcagatataataaaaaataaaatgaatggagttttttaaatggatcgacaaacagttacaatttatgatgtagccagggaggctggtgtttccattgctacagtctcacgggtggtcaacggcaatcccaatgtcaaaccttccacccgcaaaaaagttgaagaagtcattaaacagctgaattaccaacccaacgctgtagcaagaggtttggctagtaagaaaacaaccactgttggggttattattccagatgttaccaacctttattactcttccttggctcgggggatcgatgatgttgcttccatctacaagtacaatattatcctaaccaataccgatgagaacttggaaaaagaaatccttgtcttaaaagatttgttgaccaagcaggtagatggtgttatttatatgggtcaccatatttcagatgaattacatgcccaattagaaagtgtgccaacccctttggtcttagctgggtcaattgaccaaaaagggatccttcccagtgtaaatattgactacggtgcagccatgaaagatagcttggacattttatttgaaaatggcaatgaaaaaataggctttgtttaccggtccgtcgacgaagaaattgactcccaggtccggtacggggcctataaggaagcccaccaagatcatggtctcccagtggatgataatttagtctttacttcatcaaattcatataaagacggtcaaaatatttatgaccagcttatatccaatggggcgaccgctgccattttctcagatgatgaagcagctgttggtttcttaaatgctgctcatgacaatggcttgcaggtcccagaaaaatttgaaattattgtctccaataattccaaacttgttaatatgacccggccccagctcagtactgtccttcaacccttatatgacatcggggcagtttctatgcgcttgctgaccaagatgatgaacaatgatgaagttgaggataaggaaattgtcctcccccacaccattaaaaaatggggcactaccaaatagttagccatcctaataaaaagctaaaaagatgacttgcgtgaaacaagtcatctttttagtatgtttatcttgctaaaataaaagagacggtagtgggttgaccactgaccgcctctttttattattcttcgtcgtcctcatcttggtcgtcattgccaccaatgatggaatcgataaagtttcgtaaggtgctttcgatagaagaggcgtcatcgtcctggtcgttgccagcattttcttcttcacctgcttggtcttgaccatcttcctggtcgtcatcagtgtcttcctgtccatcgctgccacccgaggaagagccacttgatgagccgtttgtgttactggaagaaccgcgggtgtttcgattggcccgaccactccagaaattatccaattcggaggaagtcgcttggacggtgaagtcataaacagttgtcccaggaacattctcagcatcaaacaaggcttcagtcgtaggcccgccgaggttgactactttaccatctggcaattcaacccgaccagttttcataccggtttgggtcgagatggtttcagtggttaatttatcttctggcatgtagaattcctcgcccaaaccaatgaggtcggcattagtttggtagatagtgttgagcaggttggcccatagacgtcgagtccggacacttgggtggaccccatagtcatattctactgaaatattttggttgtcataacctaaccaagtaccaagggaaacgtttggagtagagccaacaaaccatacgtccttgtattcactagaagttcccgacttggagaggaggtcggcatcgaattgtaggttgccaggaatttcactaccagtcccgatatcagagtgggtaactcctctcagcatgtcaacgagtaggtagttgctggcttcggaccaaacccggcttggttcattattttcgcttgtttcataaagcacgttaccattggcatcctcgattcggtcgataacgtggggtgggttaaaaactccattgtttgccaaggcggcataagcagctgttagttcggtaacagtaggtccatgggtgaccccacctaaagctagggatgggttgttgaattcgtcgctactgatggcgtcttggcctaagcctaggcgacggacgtattgttccacatcgatgtcgttttctaaaagttccataaagactctagaggctggaatattttgcgattttggtagccagtcctcagcaggacgccattggttggttgtttctccgtagttggaaatagcgtgggttccgccaccacttggaactgagaaaggagtgtctgggataacggtttgcggggtaataatgtgttcagccaaggccggaccataagccacgaggggttttagggttgacccggatgaccgtctagaatcaaagggaatattgtaattagagtagtcataatcccgtccaccgacgaaggctaggacccggcccgtctcgttttcaatgacagtagcccctaattggatcggaaagctttcggttacggtttcgccgtcggaattggtgtaggtgatggttttctcactacctaagctatcgatttggtcttgggcagcctggttaatggcggtgtggaggtctttgtcaatagttgtataaatcttgatcccctgagaccgcatcatggtgtcggcctggttataaatttcttcagctagttcattatcttcctggacctcttcaggactgtagtcactggtttcaataatctggttgatgataatatcccgggcttctttttcggccaaatcataaacataaaactggcgttcagacccgtcttcatcttcttgtcgtgggatgaagtctggttctaagtcatagtctctagcttcttcaaattcttctaaagtgatgtagtcttcccggtacatgttaaacaagacgatatccttccgggctaaaccacgggagaggtcttctttgatagacccatcttggttgtaaggggagtaggcgatggggctttgcggtaagccagcaataaaggcagcttggggcaggttgagttcgtctggttgaatgccaaagatcccttcagttgcttcttggataccggcaatattttgcccccggttattccgtccaaaaggggacacattaatgtaagcttctaatatttgctctttgtccatgaagttttcaagtcggagggccaaaagaatctcgttaaccttccgcttgtgggtggcttcattagagaggagctgttgcttgatgacttgttgggtgagggtagagcccccagtctggctttcgctaccggtaaattcttgtaacatagcccggacaatcgccttcggtacgattccttcgtgttccaagaagtattcatcttcaactgctaccaaggcatcgataaactctggtgagaccttgtcaatggtggttggggttcggactaggtcagaccgcaattcactaatcaggctaccgtctgcataatgggctgttgaggtgatcgagtactgggttacttcctcagccatgacttcctgggaggggatatccccatccactagggaagcaaagtagccagcagccaaaccgccagctagggccccagctacgacaaataagaaaataaaaacacctagtaagcttttcattactctggcaaaaatatcaaaataatagtatatgttctctagccagtttcggagggtatgcttccaattatttgacttcatatttaactccttaagggtattaacttacagtttgattcagtttattatagcaaagctaggggcaaaataaaagcattcttactaggaattaagggggataggtaaaggaaaaactagggttttatggacccgggagtttgacagttttaaatgacaaaaagtgccacaaagcctatcagggctttatttttttgccaaaattttattaaataacattgcgtactattacgtactgtgatataataaagttatcctatccctgaggtgatcagctttgcgtatcaaaaaaagtcgttcaaaaaattcggtttcttatgccgttattaaagatattactcgtaacggtaagcgcaccactaaaattgtcgaaacactgggcaatcacgaagaaatcaaacaaaaacatcccgaaatggatccagaagaatgggccaaacagcgagccgccgaattaacggaacaggaaaaacagaaaaagcaaaagatcgccattcactacgatccaaccaagaaaataaaaaaagataaacaacaactttttaatgttggttacctctttttacaatccattttagctcagttgaaactccccaccatgacgaaaaaaatcgccaagcagcatcaatttaaatatccgttggatcaaattttatcttgtctcatttacaatcggattttgagtccggcctccaaaaaaagtgcctttgaatttgcccaaaccctattagaaccgcctcaatttcagttacaagatatttaccgcagtcttgatgtcttagctgaacatacccatgatattcaagaacatttttatcgattaagtcagaaagtagcgaaccgggaaactgccgttctctactatgactgcaccaattttttctttgaaatcgaagaagccgaaggcctgaaacaatacgggcattccaaggaaaatcggccgaaccctattgtgcaaatgggattatttatggacggctcgggcattccacttgcttttaatatcacaagcggcaacaccaatgaacaaaccaccctgaaacctttagagaaaagaatccttaaggattttcgcttatcaaaatttgtcgtctgtaccgatgccggtctctcttcaacagccaatcgcaaatacaacaccttaggggagcgtgccttcattaccactcaatcggtcaaaaaaacgaaaaaacatttgaaagactggcttttagataaaagcggttggcgacttagtcatggcaaggaaagctatcacttagacgacattgatgaaaccgctcatttttcagatatcttttataaagaaagatggattcatgaaaatggactcgagcaacgtttcatcgtgagttattccccaaaatatcgccaatatcaagcttctgttcgacaagggcaaattgatcgagctctcaaaaaagttcaggagccttcccggctccaccaaaaaggagcgaatgatgttaatcgcttcatcaaatcaactcatgtcactcaagaaggtgaaattgcccaacaagctgaacatacgattgatcaagatcggatcgaagaagaagcccagtatgatggcttttacgctgtctgcaccaacctcactgaccctgtccaagatatcctttccattaatcaaaagcgatgggaagatcgcaagcttctttccgattgataaaaaacgactttaaatctcgacccgtttatgtccgtaaagatgcccgaattcaagcccattttctcacttgttttctgtccttaacggtttttcggcttcttgaacagaagttagatcatgcctttacttcccatgagatcatccaaaccttgcgtcaaatggacatgttagaagttcaagatgatgcctatgttccagcctacaaacgcacacggttaacggatcgcttacatgatctttttggttttgaaacggacctcgaaattctctcccaaaaagaaatgaaaaaaattttacgccaatcaaaaaaagccaattagtacgcctttttttgaaccataaaaaacccttctaaatactgttatatcagccttcggaagggttttgctttcaaaaaagtgtcaaactcaggagtttattatagcaaagctagtggcaaaataaaagcattcttactaggaattaagggggataggtaaaggaaaaactagggttttatggaccctagttttaaagtagttttattgcttaattggcatattcaggaagggattcaccgatggcttctagccggtcttggacctcttccttgctgagattgtgttctttcacatagcggttttcaggatggatgcggcattcatgactgcaaccgcggagatatttgtgctcgttttcttctgacatgaggatttgtttgttgcagtaggggttggcacagttgacgtaacgctcacagggagtgccgtcaaaccagtcgcgaccgatgactgttttttctttcttgttaatatcgacactgattcgctcgtcgaaaacatacattttgccatcccagtattctccctgggtttcctcatcggtggcatagttatggatcccaccattgagttggccgacatcttcgaagccttccttgagcatccaaccacttagtttttcacaccggatgccccctgtacagtagacaaccactcttttatccatgaatttatctttattttcccggatccagtcgggtagttcacggaagttgcggatgtccggtctgactgctcctctaaagtggcctaggtcatactcgtaatcgtttctggcatctaaaacgactgtgtcttcatcgaagagggcatcccggaattcacttggctccaagtgcttaccggtagtttgattagggtcgacatcctcgtcacctagatgaagggagacaatttcgggacgagttcgcacatgcatttttttgaaagcatgttggtcagcttcatcaatcttgaaaggcatttggctaaagcgagggtcttggtgcatgcggttcatgtattcgtctgtgtcttttttcttaccagaaagggttccatttaagccttcttttgaaactaaaatccgccctttcaggttcaattcatcacacatttttttatggtctttgcgaaattgttcagggtcatcgatggttacatattggtagtatagtaacactctgtagtctttcatctttcttcctccattatcttatagtgcaaatataagttatgaacacacgaattataaactagttgttggtaatattcaaatatcaacttttaagttaaaaggcaaatcctatatcaaaaataaaagccggtgtcataaagctaggaattattttatagaatagaaaagagattgtaatatagctgaaacatattaatattttttaatgctatacttttaggtgtattcactcttttgaagaagtcggttatgtatgggaggattaagcgatgaagaagaagtttatcaggacatctattaccagttctttaatttttgcccaattgctaacaagtcaggtcgctttggcaagtgattatgacagtgaaatagccaatgcccaagaagcccaaagtcaagtggaagccctggacagtcgtttgagtcaagtcacttcctctagtaagtcaactcaggaccaattaagagacctagaggctgccattgctgataacgaagctaaattagcccaagctagtggagaattagagtccagtcaaggtgactaccaagctttacttgacgagattgacacactggaagcaaacattgaaaaaagagctgaccgtctcaaggaccaggcaagagctgttcaaactaacggtcaaatatctcaatacatagactttattatccaatctgagtccttaaccgatgcctttgcccggttagaccttgtcgttaacttgtttaagtctaaccagtcgattatcaaagaccaggtgaaagacaaggaagctttggaagccattaaagaagaaacaggccaaagtattttgcaccaggcagacttggttgatagcctagaggttaccagtcaagacttggaacaacagcgccttgaccaagaagttttgttggctcaattagctgctgaacaagcccaattggcatctgaacgagaccagtttattgcccaaagagaccaggcccaggcccaagctgaccgcctctttgcccaaagccaagagattgctctagcccaagaagtagcccaggaccaaattgaagtcagtgaagaagctaatgacgttgatttagttgaagaaacccgtcaagcattggatcaagctgaaatcgtagaagaagacgaccttgaccctcaagagggggaagaggaacagactcaacaagagcttgacccagaagttgcagaagaagttattgaagaaggtcaagtcgaagcgagccctggacaagattcagaagatgaagctgggatagaagaggctagcaatcaagagattccggttgaagaagaagaaagagaagatcaagcaaccagccaggaccaagtcagttcagaaagtcaggatcaagttagtcaaggccaaaaaagttcagaaggtcaaaaccaacctggccaagaacaaggtcaaggagaggagactagccaggaggaaactagtcagcaagctagcaattctcaagcaagacctgctagtcaaccggctcctagccaagaccagtcttcctctaccaaccaaactaaccaaccagcaactaataataattctagccagtctaaccaaactaaccgtaacaactgcagtcaaacgagccaagcttctagcagtaataattcacgccaagatagccaaactgctagaaacgacaattcaaatcaagttaaccaaagacaagctaaaaaaccagcccagccacaagctaaaccacaaactcagtcggttggccaaccatctctatcctggtcaagtatccagagcacggccaatagctacctaggcaccccttaccgttggggtggatcttcaagatctggccttgactgttctggttttactcaattggtctacagccaacacggtatttcccttccacggaactcccgggcccagtatgcagcaaccaaacgtatatccaaccctgcccctggtgacttaatcttctttggaaacggaggtcgggtaacccacgtaggaatttatgctggtggcggccaatttattggttctcaaacttcaacgggtgtggcctatgccaatgcccacactggctactggggagcacgtttcattggttacggccgggttaactaaatccaaagccgtatttatcctaacaatctaatctccatgttaaaccaagcagaaaaaagcgacccatccatgtgattggatgggtcgcttttgtggttctacaacatttgacctaggtgaaggactcaccagggacactttttagcttcttaaactcgactcaattgtctaagttacatacgaaattaaagcagaacatttgttattctcaaactttggctcaagtttgagaattattccgatttttctcaaataacttaagttgtttgagaatttttcgatgtttttctcaaacaacatatgttatacgagaatttcaatgtttttttctcaaataacatatactatacgagaatctgagcgtttttaaaaaaacaattgttattattcacttacctctctccaagttctggcagccccatttcccacataagaaaaacagctagcgcggttaggctagctgcttaaaagtaattttggtcatttaggatactcagaaaatacagttcaggactggcttacaagtatgcctctgtaaggtttaggaattcatcaatatcttgcttgactaggtcaatggctgattgccagaagtctggttcttctaagtcatagcctaaatgtttttgaaccaggtcttcactggtcatgcaggctgtatctttgagcaagtcaatataacggtcttcaaattggtcgcctgcttctttggcttgggcgtaaattcccatactaaataagaagccaaaggtataagggaagttgtaaaaggcttggtctgtcatgtaaaagtggagcttgctggcccagaagctagggtggtagaccgataaggcgtccccaaaggcctgcttttgggcttccaccatcaattcattagcccgatctggagagactaagccagtcttccgttcagcatagaaagacttctcgaaaataaaacgggactggatgttcataaacataacagctgcccgggaaatcttgctgtctaaaagggaaattttttcttctatagaattcgcattttgaatggtagcatctgataccaccatttcagcaaaagtagaagcagtttcggcgacattcatagcatattcctggttcaagtaggcttggtcccgtaaaacataggagtggaaggcatgtccgagctcgtgggcaagggtggagacattgtcgggactgccagagaaggtcataaagattctagactctttggactctggaaggtccgaacagtaaccacctggccgtttactagcccggtcttcagcttcgatccaagcaccgtcgaaggctttttgggccaggtctttcatttgcgggctgacctgggcaaagttgtccataataaattctgctgcttggtcaaagctataagttgcgggtttaaattctccgacagttaagggggcttctaaatcagcccagcctaactggtctagaccttgcagttgggccttgcgttccatgtatttgatcacatggtctttattttgattgatggtcttccacatggtatccaggcttttttgattcaagcggttattttctaaggcaggtttgaggaagtcctcttccccgtgcaaggcttggttagccaggttaaagcccacgatatggttgagggtggttgcaaagaggcttgccttgtcttgccaagcttgctcccaggcctttaagatttctgaccttttgctagggtcttcctggctggttaacttgttttgggcttgggcggctgagtaataattgaccttcccctcttcttcgataggtactttgacctgggctactaggtcattgtacatggactcccatccttggtagccatctggacttagttggctaataattttttcctggtcaggactgagtaacttattagcatcacggcggatttcatttaaacgaaaggcaaggtctttgaaagggtcttcttctagcaagttttgccaatcgtcttcattaatttcttgtatttttttgcttaaaagggtgagggtttgactaaagtcatgttccagcaggctaacctggtttagattgtttagggatacggtgtcattcacatcagctgacaagtgagcgttggcaaaggtccctgactggttcagtcccttggcaatcttggcccggtctgctaaaatatcaataaattggtcctggtcgacctggtcatggtctgtttgccaagcttcaattttttccttaaagctagtgatctggtctttcaccaagtctaatttttcatggagggcaggggagtttggcccgccttcaaataccgattctaagttccaagtgtcttgataaaccatactaatcctcctcgtaatactgtatccctagtttacactatctgggccggcttgactattttgacctctgtttagagtaggcgattttcccaccaaagcagtgagagaattccctaaagtaaccagaaaactttattctaaggtcataatttggtataatcttgtagtcagtaccatatggagattataaaataggaagtgatttttgtggcaggacactcgaagtggaataatatcaagcagcgtaaaggtgctcaagataagaaaagaagtaagcaattccagaaatactctaaagagatctacaaggcagcaaaagatggtggccctgatcccgaaatgaacgcttcactgcggatggctattgacaaggccaagtcaggtaatatgcctaacgacaatattgaccgtgctattaagcgggcaaccgaccccaatgaaggggctaactacgatgaagtctcctatgaaggctatggtccaaatggtgtaggtatatatgttgaaaccctaaccgataacaccaaccggacagcaaccaatgtccgcgttgcctttgaccgcaatgggggcaacttaggcgagaaggggtctgtttcttacatgttcgagcggaaaggctatattgtcgtggaacgcgatggcttggacctagacgaagatgacatgctccttgccgtaatcgaagctggtggggaagacatggaagcatcagatgatgtctttgaaatttatacccaggccagtgacttcaccgatgtcgttgatgaactggaaaaagacttcaccctggcccacaaggaattgaccatggtaccaaacattaaggtcagcctatctgaagaagatgaaaacaagttaaacaacctagtggatgccttagaagatgacgacgatgttaatgaagtctacaccaatgcggaataatgatagtaaacaacccagttaggaaattcctagctgggtttttcatagatacatgacaaactagtgcttggatggagattttaaccacaataaaaggatgtcaggacttcaaatcctggcaccctttttgactctcaaactttactagacaacttggactagttacagcctcttatctttttttaagcccagacctcatctgcaatgtctttgaccaagcgaagtttattccattggtcttctaagcttaacttgttcccatgttcggttgaagcaaaaccgcattgaggagacaagctgagccggtctagtgggatatattcggcagcttggtggattcggtcaatgatctggtctttatcttccagttcagggcgtttggaagtgatcaaacccaagacaacttccttgtccccgcttattttttgtaaagggtcaaagcctccagaccggtcatcatcaaactcgagaaagtaactgttgacattttcttcctcaaagaggaattcggctacccggtcgtaggggccactggctgagtaggtagactggaagtttccgcgacagacatgggtattgacgaccaagtcttctggccggtcagcgatcacccggttgttggtgtccacaaaaacttgttttaactcttcaacgccagcctggtcagtcccgaagtgttcaggcgctttgtcatcaaccagccggccccaagagacatcatcgaattgtaagtaacggaggccagaatcataggctttttggataaattgccggtaaagagaaacaatatcgtcggctaactctgcccggctattgtaaaatttacctgtattctccctttcttcaggactaatgaattgtttaaggaattgagctggtgcggggacagttagtttggcggtatggttttcatcttcaaattgttggacaaaggctaagtggtccaagaaggggtggttttcgttgaaggagagtttgtcgactaggaaggtgtcatccagttctgctacgatacctgaaaattgaatcccagtattagtgggcttgtggtcaaccccaaggaagccccacataaagtctaagtgccaggtatctcttctaaattccccatccgtaatgaattcatagcctaattcttttagcttgttaattaatttttcaatttcctgatcctcaacttgctttagggctggtcggtcaatcttcccttctttatagtcttgtcgggcctttactaattgttcgggtcttaaaaaacttccaacaaaatcgtgctttccggtaaatttgtgactcatgataattccccctatgaatgaattcttgcaaaaacatcaacaaaattaatctggtatgaagtaggactccctaactttcagatccttagcaagctggttcaggactagccaccccatcaggcttttttgcctgaaagctttagatccagtcgctaggacaaggaaaaaacggacccagtagctattcatttttaggatctgaaatagaccaccccttggcaatcctttcgctcagtacgaatgcttgcctggtctaatgacccaggccctatcctaacctcctttattttaggtcaaacaaaaagatcccgtccaatcaaaggacgagatctctcgcgttaccacctatatttttatcaatctcacgattaataactctatgagtaccatcatactcgctctctataacgggagaacccgaacccacctcaatctcgatgcggtcaactcgaagaccattttcaacaggcttttccttaactgcttccaccaactacagtctctctgtgaaggctccacctatttacttttcttgtcaatgctttttaatataactatagtatatctaattttatttatttgtcaagaattattcatgataaaaatttatcttttaaaaagcctagtttattgcaagtaaagcttcttgcattaaattggttagaataatgcttagtaaaattgcaataaaatatcaaaaagcttcattttatttttataattcacaaaaataattttggcctttttttgcgtattattaaccaggagcaaaaatagatgtgaaaagagggaagcatatggaagtcgaagcctacgccaaaaagatcttggctctggcccaccattaccggaccagtgatatccacctgatgccggaagcaggctattaccaaatctactaccgcttgagtggccagatggtccagcagtttagcttgtcggtaaaggaaggggagagtttgatctcttacttgaaatttttggctaatatggatgtgggggagaggagaaggccccaaagtgggtcctgcagtctcaaattaccggacgtaatggacctccgcttatcaacgatcgctaattaccgcggtcaggagtccttggttatccgtcttttagccagccaggaggaaggtcaaagtcgggcagattgcttctttgaccatgaaaggcaggttttagaggatttggtcaagtataagagtggcctcatcctctttgcaggacctgttgactctggcaagacgacgaccatgtacaggttggtaaagaaacggtcggctagccacaagcaacaagtgatctccattgaagacccggtagaaattgaagaggcagatttcttacaggtccaggtcaacgaagctggaggagtcacctatgaagccttaattaagtccagcctccgccaccaccccgatgtcctcttggtaggggaaataagggatgaagaaactgcccgaatggtaatccggggggctttgactggtcatttaattatcgcttcagtccatgccaaggatgcagctggggtggttgaccggctgcaagagttggggatcagcccggaagtcttgggccagaccttgattggcctggcctttcaaaaattgttgcctaagtattgtcccttttgccaaggggactgccagacagcctgcaaccatatcccagctgaccaaaaacgggccgtcctctatgatgttcgctacggcaaatcccttcaagacttgctggcaaaaagacaaggcaaccatgctagtcaagcagaccagccacggtcctttaaccatttgctaaagaaggtgtatgtctatggttttatttcgcaagaaacctatcaaagctacaagatcccttaagtcactgcataaccaggccatcttcctgaagcggctcggccagcttctactagaaggtttatccatgcaagaagcccttcgtttcctaagtacaaccggtaaccaagaaattaagcaatgggttaaccatgtacaagcaggctttagccaaggcaggaccctagatgaaatgttaggggagttgaacttttcggaccaggtagcttcgcaaatctacttttcccaggttcatggccagtttgcccagacgatcagtgattgtggccaacaaatgatggaccggatggagcggaagaaaaagctccagcagatcctaacctatcccatcatgctcatcatttttatcatcggcatgctctttgccatgaggtatatcttactaccccacttaacccaattgaccacttctgaaaccaaccatatgaatttggggactcgactggtttttatctttatccgcgagtcccccatcctcttaatcctagccacatgtctgtttagtttggccttgctcgtctttcagtactacttatccaaaaaaactgccctagccaaggcctctattctctgtcaactccctctggccaggctggtcttacccctttactatacccagtttttggccatggagtggggccaccttcttaatcatggcagtaacctgcttgagattacccaaatcatgaccaccgacaagaataccaatctggtgaaagaacttggccaagccatcgcccaagggatgcaggctggccagtcttttaagacctctattagtgactatagatttttaaagtatgaattaagggatattattgattatggggaagagtccagtgaccttggcaaggaattattgctctattccaggcagtgccaggaagaattatcgctaatagtcgaaaaaattatgaccctggtccagcccttggtttttatcggtatcggcatcctgattgtttccatctatgccgccttgctcctacctactttttctttgctgaatggcttgtaaaagcaagctttaggcaagggaagctaagcccgtccagacatgtctagtcaagctagcccaggatgggtttttgcttgcttaatttttggtaatagcaaacttagctatagcaagccttgtttatctaagcaatttgtgaaaactaaatggcgaggaaggagatttgcttgcccatcccggttttttgttgtaaactatcctagcataattgagatgattgaaggacaggagtaagtgagaggtgtcttatggataatcgattttggcaagaggaagacgaagcggttgaattggccttaaattgggctaagaaaagaacagtatctggatctgaccccaaggctacagcccattcagccgaatacctcagagaacaagtgggccagaccattaccgaagagggcatgggtcccaaagaagccttagctatctatgaggtcctcagtgaatccaaccggtcttctgacgatcccatgaactttgcctacatccctagtgcaccaaccagggcggcagttgcctttgatgaagtagtgtcagcagcgaatgttttcggtggcatttgggagtgtggggctggcagtatatatgctgagaaccaagttgtagactggatcaaaggctacttaggctggccggaccaagcgattgggaccttcgtttcaggaggaacttacggcaacctgtctgccttggcatgtgctagggacaaggccaaaaatacttggaagcaagccggtacttacccggatggtcggccccaggatggctataagctgattatttcagaagaaacccactcttcgcttgaaattatcgccaaggttttggatgtcgaccttttaatagcggaggtagacgaaaaaggccggatgagcggccaggctgttgaggatttaatcaaagaccatgaaggtgtctttgcggttgtggcctcaactgggaccaccaataccgggtccatagaccacttggagtccatcgctaaggtctgttcaaaccaccaagtatggctacatgtggacggggcctatgggggagcaggtctattagccccaagtgtaagacagctttataaggggattgaagctgccgattcctttatagtcgatcctcacaaatggttatttgctccctatgacgcttgcctactcgtctaccggagtcctgaaagtgtctaccaaaccttttcccaacatgctgcctacctggatggggtggaccacagtcaaagtaatccttctgatatggcagtccacctttcccgaagaaccagaggccttcccttgtggtattccctagcgacttacggaagcaaaaaatacagccaagccattgaaacctgcctggactacgcgagacaatgtgcccaggccatcaaagccagcgaccacctggaattagttatggaaccaaccctgtccattgttgtctttaaacgaaaaggttgggaccaagaagactatgataaatggtctcatgacctagccttagccggcaaactcctatgcctaccttcttcaatcaagggccaaaccgtcctccgcctagccttcttgaatcctaacaccgatattgaccaatccattcaaatagtccttgagacgacaaaatagagaaaagcttaagatagtaaaattgaagccatggagttgaaatcttctccatggctttctctatagggataatagacttaaggttaaataatcctcatttaaagcaaagtagtgacagtcggctattgattaatgtggagagaggtaattaacaatgaaactaacttttaaaaacatggtcttacttagtccactattcttattggcttgtagcaaaatgctgacgtttcagaacaatttaataattctgtctattataacgtagaccaacccgaccaggagctcgttttttacgatgggagcttgcaggtggatccggaatctccgattaagccctttatcagcaaggctgacttaaaagaaatgcaaaaaaaccaataactatgagactcagatctttgaataagtaaacgtttttactactgaaaacaatacttatgaagtagttgaccaatcatccatggatactattttgactttcacttatgatgaagacagtcagcaactagtatgggatgatacagtttactctaaaaaataagaaggttataaaactagccgttttaccggctagtttttattggggtaacgaattgctatcaatgaaatcaaactactttttaattaaaaaacaacagaatgataagtttatacttgaggtgttcagcaagactaattataatatagctaatattacttgtcccattaaaatcaaaacaggggcatgttagtattcttaatcaaaataataggagatatgccttatggttttcaatcatgtaacctcagtaatttatgcaacatttaaatccagaactaaaaatattagattgagggaacatattgactttattagagctaaaaaatattgctaaagtgtttgacacccagtctggtcctttcgaggctgtccagtccatttcttttaccattgatcacggtcagattgtcgcccttttaggaccaaatggcgcaggcaagacgacgacagttcagatgattgctggttacctagaagccactaggggaactatgtatatgggaggccaggaactaacccagaaaaatcgccgccactctcagataggagttgtcttgggaggggaactgggtttttatggcaatgccagtgcatgggataatctcgtttttttctcccacctagataaaatctctcggtcagacatcaaaagggaagttaaacgagttttaagtctagttgacctatcttctgttgcccaagagaaggtatataccttttccagagggatgaggcaacgccttcacattgcccggtccttgctgagccatccccagttattgctcttggatgaaccgacgaccgggttagatgttgagattagcaaagagattcaggacttagtcaagcaactcgctcaggaagaagaagttggcattcttttaactagccatcaaatgtcagaagttgagtacttggcagatgaaatcctcctcttaggggatgggaaaattcaacataaggggaatgttgaaagcattgttgctctttctaaggtgacccatgtggaccgtccagcaactttggaagaatcctatctcgcccttgcctctcagttgaaaagggggccttctgatgattcgcttctttagtttggcatggtttcatttaaaaatatatgctaaaaattcatactttatcaatttaatgatcaccagtactctatccatgttctttttagactatattgcccagtctgcacttggtgcagacttgagccagattatttggattcgtgcttcaatctttggcttatgggcatccggcacgacagctgccggatccattggctttcaacgttttcaggggaccctgctttatctgattaatacagcctataatgaccaactctccttggcagctcttattgctcctgcagctagttttggtttgttaagcttccccctagctattttggcagcctttatcttccaagtaccggtcagaatccaaggatcttttatcctagctggactggctctctggttaggagctttggtgttagatttattgattgcttctgtttttgtcttaaccaaaaatgcaattgtctatgaagacttattaaccttaccattattgttcatgtctggtctctttccactaccaggatttttgcagtcgatccagccccttgtcaattggcttttgccgattgccttgcctatccaatggttactcggttttgaggcattgagtgcctttaccgtctttcagttcatcgtttgcttggccttgtctcttgttttaagcataaatattagtaagtatattctgaaacaagcccgtgtttctggcaagttaggaggcgttttatgaaagttgtcctttcatctattgatgttttagacaattggaagaccttcttaatccatttttttattcttcctattttagaaacgtttgttttccttgcccttcattatcaaattaccgcaagtttcaatagtcgtttggttgtggcatctttgcttttagctagtgggaccactgcaatgaaccagatgggcgggtcctttacccaggatattattagggggattgaccgtgatttagttaggaagtcgccctataacctgtatttctgggggtcaaaatttgtcgtgatcttcgtattttctttgaccttgtttttgactaacagtctcttgttttggttagcaggggttgattctagagccttaataatgggtttgctattaagtccattaatcatcctctttggactaattattggcctagcatgtgccatctttggttggcgcttgcaaaaccattatgcttttaccaatttttttgtgagttttgcccttgtcttttcaggtgtggtcgtcccttattggttatatccgccccttttttatcccctaacttacatcctgccctttgcccgtatcatggccatgcttttttcaggtgccttttccgttcacttgtttttgcaagacgggctgattgccttggtctggtttttattagctgtcatttgctaccagtaccaggttaaacgaatcgctacttacacacgcaagggtatgttataaggaggttggctatgcaggatacaaaagaaattgtcggtttttataagatcttagaccaggtgagtcaacaagctcagtcccaatatgctaaaaagcaaatcctaaaaggagacttgtccccttatttagaagtagcccaaactaaacaggctgaaacagctgaagctaaagctctcttagatggtcagttaagtgttccctttatgggtctgcaacatatagaaggtttgactcagaaagttgaaaagggactcatcctcgaagctggggaactaattgagtacgctgactttctccgtagctcgcgtttgatccggcaattcttccaaaagaatgcctttattgccccaatcttgactggttatacagaaattttaggtgatttttcacaagttgaaaaagaaatttatcaggccattcaccagtctagggtccatgaccaagctagccgtaacttacgaaaaatccgtaaaaaaattacccaaaataaagcttcaatccaaaagaaacttgagaagttcattaaccattcgagtcataaagataagatccaagaagctgttgttattgaaaaagacggtcggttcactgtaccagttaaaagttcctttaagcgacttgtgcccggtcagcttatagccgaaagtagtaaaggtctcactgcctatattgaaccccattctgttagcaaacttgctgaggagagagtcatgctccaagctgaagaaagtagcgaagtttatcaaatcctagcctacttaaccggtttgattcaagcccagatggatggcatccgctcttccatggagtgtattatcgaactggaagtagtcctggcccgggctaaatattcccggtccattaatgggcggccagttcccctcaacaaggcggaatatattaacttagtagaagcaaggacccctctaattgaaaatcccgttcccctatccttaactttagatggaagagagtccagaggtcttgtgataactggagccaatgctggaggtaagacggtggttttaaaaaccgtcaccttaatgacctatatggccatgtctggcttactcgtcccttgtgaagagggaacagaactagctatctttgaagagatttttgtcgaaatcggggataaccaaagtattgaacgatccttaagcactttctctagccatatccaggccttggcaatgattggcaaaaaactaaaacgccataccctagtattactagatgaaattggcagtggcacggaaccacgggagggatcagctttggccattgccagtttaaatgatttttaccgcaaaggggccctcttaatggtcaccacccactacggggaagtgaagaccttcgctaaaaaccatcctcaatttacaacggctgctatggattttgacattgaaaaattagttcctacttaccaagttattatgcatgaaactggtgacagtcaagcctttaccatagcttctaaaatggagctacctcaaactatattagacacggccaaggctatattagaagataaccaattacccttggatgtcaaaacatttgatcctattccgatccaaaaaccagaagagtcagcaatggataccaaaattaatttctcaaaaggggaccgagtctatgcttcggagtttaaacaagaagccttgttttatgaattgaatgcctcgggcgaccaagcgaagatctatattgatggagcctggaagcaaacccctctccaaagactaaaactcttaatctcggctgaagatctctatccagcaaattacgatctagaccgcctatttatggactatgaccagtataagtactaccacgacctctaccgggggtcaaaaaaggcctggaaaaagaaataggcaggcttgagctaggggaagttgaaatttaattagtcaagtccaaatctatgtgtaaattctacaatatagtaacagatgttatacgacggggctttttctttttccgtcggtcggcgtgatcggctaaacacaccgtttggcgagcggaaagagtgggcttctcttgaagcgagccagcggtgtgttagattacgccaagtgaccgagggaaaaagccccttttccagagggaggcaggttttaaaaggggtttaaaaagttcaacctatcgtaaaaatcgatagttctgagcttcccaattctcctgcaggtttaataagaccgagccggctagccgttccgcggatttgatattggggaaaatccccaccactctttctcgacgtcgaatttcacggttgactcgttcaatggaattggttgttcttaaagacatgtggtaaggagaaggctcgatctgatactgaatggcatcttcaaagccctcatccaataggctcaaggctttagccagcttcgcttggtcttcgaattccgcctccaatgcttgtttccgttcacgagcttcctgctgggttctggaaaataaaaccgcttggaaacgatctcggatgactcggtccgtggttttcggcaaggcatcggtgatattgcttaataagtgaaaggtacagcgttgccaagtggtgttgacaaaacattcttgaatagctttccgtaagcctgcatgggcatctgaaatcaccattttcggcgtatcaatgcctctggcttttaaatcgaggaagaacgaccgccaactttccgttgactcttgcccagccactttaaacccgatgatttctcgcctattctcatcattgactccttgggcgatgtaaagggctttggacaccacccggttatcctctcggacctttatatacatggcatcgacatagatatatcggaaattagtatgggtgagggaccgcttttgaaagttaaagacatccttgtccaggtgtttattgacatcggagacaaacgatttggagaccttttgaccacaaagggattcgacgactttcgtcattttacgggtggagatgccattgacgtacatctcaaagatggtagccaatagaccttgatccatccgctgattaagttcaaataattgggtatggaagtcgcctgatcgcgttctgggtacgttgagtttgagggtgccgattttcgtggtgaaatctcgctcgtcatacccattgcggtaatcacagcgatcttcatctcgctcgtaccgcttgcttttcatatattggtcgcgctcggactccatataagcatttaagaccgtcactaaggtggatttcatcacttgatccagatcacaatttaaaattgcgtctgttaatttattggcgtctagtgtaagattgagttgagtcataatgatcttcctttcaatgtgttttttggttttctataactacattgtagctcaaaaaggtcattatgactttttctttttacacaattatatggactttatcatttaattgtatgttttttaaataaaattgaaatggagttgacaagatgattcatttaaataacctgtcctataactagcgaacttttcataaagaaggcgttttttggggaacgattaaagagtttgagaagagggaagtcaagggatttcaagctgtaaaatatatttctttacacgttgaagcaggcgaaattattggcttaattgaaccaattggtgccggaaagaactgccttatcaaaatgatgacggaaatattggagtcaactagtggcacaataacttgtaacggcattacatcatttgataaagacaagcaatactttaaaatcgattggtgtgatactaagttaaaattctcaattaatctaggacttgccagccttaaagaccttagatatgttgcgaattatctatgaagttgataccagggactttgaagagcgactaaatgacatggttgacttactcaaagtaagggaaaaattaaaggttccagtgaaaaattatctttaccggaccgtttttgtaatagcttatgaaaatttggccgacaccatagtagaagatgagttagattacacttttgtccggccccttagctctctcctattttatgtcttataccgagtagatatcatgagtgctattaaccttcttataacggccctggtccatgcttatctcttgtcttcctaagatatagacctatggacccttgttttacatcttttgtcaattttgttagcaacctacctggtctttattcttaaccaacttgctgtatccgtctccttttggaaggagagaagtagcaagatattagctatcccagaatgcatgcttgatttttcgtccagaccagctcccatttattccaaaggcattcgctttatattaacttggctcctgcctattttaacagctattaattcgcccgttttactagtccaaggaaatgattatgccgcattcctaattggcttgtcgttataaatgggcttgctagtgtcttggttgtctacctttggaaaaaaggcttgcagaagtatgcctcagccaattaaagtgagttttcctattggaaaaagctcctgcaaaaaagtttaaagaagtggctaggcaacttgttgattaaagcttcaatttactatcattttagttgagggtctgctataattcagttagtaagttgtcggtaaaggttatgtgaataactagggtatgaatggtagatttaaacactgaactttaggaggataattattatgggtttatggattggtttaggcatcatattcggtgctgtttttgggagttggactaataatatgggactcgggatcggaattggtcttgccataggggctgcaataggcgcagcggtaagcagcacacaaaaaacgaacaagaagggtaaaagtgaataagctacctatacactagtttttgttgggatagggctttacttcgatttaatgattgagattagtgcagaagttgattgtcccaattttattggaagacttgacagaggatcattaaataagtattactggtatttttttctagagaagaaaaccttagagcacacttttaaaagtgtgctttttctattgccaataaataaataatataagaaaataattattttttatattgttttttaggagggagtaagctataatctttttaactactaatagagctaattagcctattataagggcaaattttcgcccaatttctctagtagtttttagtaaagaaggtgccaaaattgaagtcgtcagcccagaatcattcaatcttattttcaaccataaagcgtcttttattaccctttgcccttgtttccgtcatttaccttgtctccttgggggcttccatccatatagtgaatggggataccgcaatcaattatctgatcgagccctatatttatggatcaggtccaattgattttttcctcccccctaattgtttcggctaattttagttggaacctatactttttacggaaagatcactttttaacctatgtccatccccggatcgaaaaaaataagtatatcggtgttcaaattttagccgctcttttattatctttccttatggtagcagtcgtcaatttcttagcagttgggttttcgactttaatcgcaagcccaaccccttatagtgtaaaccccaatggtctaaatggttatttatttagtcacttgcaaatgaaccacccccttttattcggtttcttttggtctatttacaagggtctaatggccagcttaatttgcctactggggcaagtctgggggctgtatagtcataatttatatttaatcttactaggaccctttgttactgtttttttagaaaacctcctatttgccctcttaaatataccagaatacagtttcccgacaacttatatcttgaaccgtttagaaacaaaagccatgactattcccaacttgttactggccattgtcatattttgctttatcatcttcctcactcattacctactaaggagaaaacatgagtccgcgatttcaatctaagtttatagaattttatcaagtcaataagtacctattattagctaacgtttttgttttttgctttttctttgtcaataacttttctcaaggtagagtgaatggatttcacaatatggaatttgccttgctgaatatggctgaccattattacctattgaatggtgtttttccacttttgctcctaatgctgacccgttattttaagcaggaaagagaagaagaagtcatccgctttgtttaccgcagggcccaaatcaggaatgaagtgaggctattagcttgctggttagccttgtattttgggatccacctcatgttgtccctggtcttagcgactatcttttttcctttttccctttcttttgaagctagcctgtcgagtaggaaccttgacatcatgatgtttctagaaggttttatggccttgttttccaatccagttttcgctttgctagctagctttgtgtatttgattttcggatggctggttctggtttcaattttatcactagtgaatagccattttggctaccgcaaattagtgacggtgacggtcgtcattctcatcctaacttatcttggcttcaatactgacttagataaccaattcccctttttattcttcaaccagtattttattttacaccacggccttcaagccaatccccaatccatttacacctttatccctcttcttattatcggtttcgccaccctggtctacgtctttaggccaataaaaaagcatacacaagacggccaaactgcagaatcttatttaagggagctcatttttcctaaatcagcgatgaagtgggcttttattaccttatctatcttattgatcatagatactgttcaagtgatagacgccatagcaaatacgggtcaagcttcattacaagatgtcattgtcaggttagttaatggcagtcatgccaatatgccggatgccctatcctggatgcgcctcctcttaataatgatgacccctctctttatcattgggagtcaaaagaccctgttagaccgctatggcgaagcccatttcattatccgttatccgagtaaggccttattaaaagccaagaccatcctaacctattctcggtttttattagcctatgccctattttttgtcgttgcgctatctcttctttttattgggggttataggtcagcctcacaatcagcattccaagaactgttggatttttaccaagtgcctgcttctcccatccaagtttttattctcattctagtccttttacttgcccaattattttttgctttcctcatttacatcttgctatctgacttattgaatgaagtggtagccctattgatcatggtggttgtttcagccctcacagcctttgtcagtccgattaacatgatcctaataactagtggtttgtcatctctagtccagttactagcagtttccccaagctttttttacctcaacctcgctttaatctgcttagctataggaattttttatttaatacagataaggagcctcatcagatggaacaaataaaactaagtcaagtgaaaaaaagttataaaaacaaagtcttgtaccaaaacgtcaatctttcaatccataaaggggactccatagccttagttggttcgaatgggtctggcaagagtgtcttgttcaaactcatcaccggtttagaaaagcctgatagtggggaggtttgggttgacaaccaagcgattggaagggatgtggactttccagaaggagttggtatcctggttaaccaacctggttatgtggaatattacagtggatttaagaaccttaaactcttagctgaaataaaaaaccagatagatgacgaccaaatcaaggaggcaatgaaccgggttggcctagacccagccaacaagaccatggtcagggaatattcaaccggaatgaagcaaaagttagggatctgccaggctattatggaagaccaagacattatcttacttgatgaaccctttaatgccctagactttcagaccaacaaggatattttaagactattgactgacttgaaggctgaaggaaagactatcctcttaacttcccaccaacattccttattggaacaagtctgtgacaagttttatatcatcatgaaccaagaagtcactgagatgtcagaccaactgaagaaagactattttaccctgctagcttagacaagctttcatacccccttaactgaagaagatagtctcccagaagggaaaatccttgctcagcggaggggggaagggagattccttattggattggtcaacaggggaacgataaagtccatataattgtgtaaaaagaaaaagtcataatgacctttttgagctacaatgtagttagagaaaacaaaaaacacattgaaaggaagatcattatgactcaactcaatcttacactagacgccaataaattaacagacgcaattttaaattgtgatctggatcaagtgatgaaatccaccttagtgacggtcttaaacgcttatatggaatccgaacgcgaccaatatatgaaaagcaagcggtacgagcgagatgaagatcgctgcgattaccgcaatgggtattatgagcgagatttcaccacgaaaatcggcaccctcaaactcaacgtacccagaacgcggtcaggcgacttccatacccaattatttgaactcaatcagcggatggatcaaggcctattggctaccatctttgagatgtacgtcaatggcatctccacccgcaaaatgacgaaagtcgtcgaatccctttgtggtcaaaaggtctccaaatcgtttgtctccgatgtcaataaacacctggacaaggatgtctttcactttcaaaagcggtccctcacccatactgatttccggtatatctatgtcgatgccatgtatataaaggtccgagaggataaccgggtggtgtccaaagccctttacatcgcccaaggagtcaatgatgagaataggcgagaaatcatcgggtttaaagtggctgggcaagagtcaacggaaagttggcggtcgttctttcttgatttaaaagccagaggcattgatacgccgaaaatggtgatttcagatgcccatgcaggcttacggaaagctattcaagaatgttttgtcaacaccacttggcaacgctgtacctttcacttattaagcaatatcaccgatgccttgccgaaaaccacggaccgagtgatccgagatcgtttccaagcagttttattttccagaacccagcaggaagcccgtgaacggaaacaggctttggaggcggagttcgaagaccaagcgaagctggccaaagctttgagtctattagatgagggctttgaagatgccattcagtatcaaatggagccttctccttaccatatgtctttgagaacaaccaattccatcgaacgagtcaatcgtgaaattcgacgtcgggaaagagtggtggggattttccccaatatcaaatccgcagagcggctagccggctcggtcttattaaacctgcaggagaattgggaagctcagaactatcgatttttacgataggctgaactttttaaaccccttttaaaacctgcctccctctggaaaaggggctttttccctcggtcacttggcgtaatctaacacaccgctggctcgcttcaagagaagcccactctttccgctcgccaaacggtgtgtttagccgatcacgccgaccgacggaaaaagaaaaagccccgccgtataacacctgttactatattgtagaatttacacatagatttggacttgactttagattatttttacgaagatgaatctctattcatttggataaaatagagaatatattataattcattttcatgataataaggattttaagggtttttatgatgaaaaacaagctaaatttattgatgattttggtaacgggaccttaggaatattgaaaatattaaaaatgtttctaaaatataatgataaagaattatgttgggatgaagatgtattttctctaataccgttaccaaatacaatttaagaaggtgatttgatgaaaaacatattgaaggatgtgcatagcttataccacagtaagaagagtttaattatatttctattgctatttggggttgtgatggctcttgattcaatcgtcacaccacattatttggggatatttacagactacatggcaagcttccaatacacagaggtgccaatcattcttctgcaatggggattgctgctaatagtcattaatttaggctcgttattgttccaatactttgcaagtagaataaggcaagaaacgaataaagatcttaaagagatggtgtttctacaagcgtatttaccgggtaacgaaatagtcaataataatgaatatataacctctattcttcaagatgtaaagcaaattgagactagttttgttaattcatttataagttttgtttactgtatattgcaaggtttattggcactggtttttgttttgaatgtaaatatgcaagtggggcttgtttttattttactaggtttcattccaactatgatccctaaattgaccgaaaagtggttacaaactagtacaaataattggcaaatacaaaatcggttatatacacaagtaatggaagatgggttacacggtaagcagttaatcaaaagatttaatgcttcaaaattaatgtatagccgtgtccaaaataagttaattgaagagcaaaaagcttattttcaatggatttccgtcaaaaaacgtcttctttcttagttggtctcttatataatattacagtcattttgtcgttagcatatggagcctttgttgttataaatggtagtttatctattggtgaactgataactgtctatatggctgccgatagggtggttagtccacttatttctttagcaacgatggtggcttcacacccattgttggataaaatactcaatcccaaccctattaggaacaggatatcacctccttctttcacaaaacaggatgcactgattgaattcaataatgcatctataggatatggtaataaattgttatcttccaacattaatttacaaattaatcatggagatcgcgtattaattcaaggtccaagtggatcagggaagtcaacgttgattaaagcattattaaatgaaattgaggtccttaaaggtcaaatattatacaatgaaagcttgagggatggtaatttgtataatcattttgctttagttgaacagaaaccttttatctttcaagatacgcttaggttcaatttaaccctaggacaagccattgatgatgatttgatacttaaagtgctaaatgaagttggcctagaaaaattggctagtgtttcggagctggataatgttatatcgtcagaaaataatcaactttctggaggagagacgaaacggttagaggttgctcggtcgctattatataataaaaaagtccttatcgttgatgaagctttgtcaggattagataatgatcgagctaaacaattaaatgaattgattgtaaattatccaggaacagttatcaatattgagcaccatattgatgacactattcggagtaaatataataaacaatacagcatacaaaattaatgttacttaaaatcaccttaaatatgattgaaatgtagcaagcaagtggtcttaatgctaaatgagtatgggcaatttttaccaattaagtatcgctacttttgtcagaagcatacagtgaagggattaatagaataacaccatctaatctatctgtttttggacaggtagatttttttgtatttattttaaagaaaatgcattttcaaaaatgattactggtattttttgcgtatatattaccaggagcaaataagcgacagcagtcagaagggggaactgcctatggatagttaataagtaattcttgtcacttgtacacaatctaaaatggagggaaaattaaatgcaaaagtttatgaaaaatattatccataaaataaaggatagccgggcgtttaccctgctagagatggcgatcgtactttttattatttcagccttgctacttattattatccccaatattggttcacaccgagatacagcttcggagacggggaacaaggccttgcaaactgtagtggacacccaggccgacttgttcgaaatggaacagggtcgccggcctgctgatattgctgatttagaaagtgcctcctacttaacacaagcccaggccagccaagctcaagaggctggtataaagatttcacgttaagatgaaaactaggctaggccttgttggtcgagaagatggttttttgactttactggaagctatcctaactatggttattgttttgatttttcttatgctacccagcctcaatatagaacaagctaagttaggagtagagacagacctctttacggaaaatttaaggacccagattaccttgatgaaccaaaatgccgtcttaaagggagaaatgtcggtggtagaagtggaaccaggccgcaaccggatagttttctcagtgatgggccagccgcagtcccccttgaattcagttttaccagtgcctgatcatattaaagtttatggtggctacaagcgctatgcttttagggctcggtctggtaacatcaccaaggttaaccggtttgcctatacggatggcaaacggaggatagaattcgtttttcaaattggaagcgggcgattttatgttcgagaaagttaaaaatgaccaggcctttatcctcttggagagtatcctggccctaagtttggtatcttttactatgatacttgttttgccctttagcctgcaattgctccaggcacggcagaagcggcaaaacgaaattgaaggctaccggctcttatatgattacagttatgaatggttagggtcaagcgaccaatgggtgacccgaagtggggttgactaccgagtttcttaccaagaaaatgccctacaagttagcctgcccaaccaggatgaaatcgtcttagaagtggtggaaccatgaaatggcttaagaaggaagaggcttttaccatgcttgaagccttagtagccctgtcgattacctctctaatcttacttgccctgtcaataggggtcagccattttaagcaagttaaggaagaattacgggctgaccggcaacttgactggcacctttttgtcaatcaaatgtccttttatctggagtctagcgacctcttgtcggttaatcagaaccggctactagtcagagaggtcaactaccgggaccaaagtgtggtccaagcccaataccgcctcgttaacggcaactttattaggcgagtcaataatgggaaccagcccatgctactcgatgtcaagaaggtggaaatggaagaggagggccctagtcttatgatgaaagcctactttaaaaatgatgaagaataccaggctagaatttgggtgaaccagtggtatgatcaagaagattgaaagtaaaatgaaaggggtcttaagagataaccaggcctctatcctggtctcctccttagtttttttaatggtcatttcctttttgttaagtggtttagggattatggttgtcagtgaatcacgccagcaagctatgattaaggacaactacctggccaaggctatgatccaaaaagcttactatataatgaaagaaatggatccatcagacctagcaaacttagcatctaagaccatttcctttaaccagggtcaggtggtggctagccaggatgaagagggtatcttttcctttacagctagcctagccaatgattaccagtacagtcagaccaaccggctttattttccagaccagttagatgaagagctagaggaggaagagggtgaagaaaaagaccacttggaaaatttagaagaggatagccatgaccaggttagtgaagatgaagaccaagttagtaaagatgaagaccaagaaagttcaagcagtcccaatccagactcgaaagaccaagaaagtcaatccggtgggccagaagaaagtaatccagtttctacaaagcttgaccaagaaaaggctagtccagacggttaaatggcaagctagaattcagtttgacaatgagtctgggttaccctaagtaaaaaaatagtttcattctatctaaaaagctactttccgaccattttaagtggaattttaccaattatgttaatttctttttgaatcaacctttgctataatggaagagtgtataccactcttcttttttatacaagacgtgaaagtaaggatgataaaatgtcgagagtttcgaaagtacaagccaagctaatagaccaggacataggtggtttgctggtgactagtccctttaacttgagatacctgtctaattttaccgggacaaccggtcttagcttgattacccaagacaaggcttactttattactgattttagatatactgagcaggcccaagaccaagctagccacatgaccgttattgaacactcgggtgacatcattggccaagtaggagacctcctgagccaagatggaattcataatttagcctttgagaatgaccatgtcacttactccctctaccaggaaatgaaagaaaaattgccaagtgacctcaagcctggttctggtctggttgaaagactgcggatgattaaagaccctgaggagttggccactataagagaggccgttaagattaccgaggcagccttccgccatattctagattatatcgaagaagggatgacggaaatccaggtagctaatgagttggacttctttatgcgtagcaagggagcttccggtgtttctttcgacacgattgtggccagtggcaaacggtcagctatgcctcacggggttgccagtgacaagaaaattgaacggggtgacatgatcaccattgactttgggtgctattacaagggctacgcctctgatatgacccgaacttttgctttaggcgatcctggtgataagttgaaggaaatttatcaaattgtctatgaagccaaccgtttggcagcccaagcagctaaaccgggtatctctggggcagaactagataaggtagctcgagaccacattgcccaggcgggatacggcgaccaatttggccacactttaggccacagtatcggcttggatgttcacgaagacccggtcttaagcaaacgaaaccctgagcctttacaagccaatatggttgtcaccaacgaacctggcatttacttgcctggccttggtggggttcggattgaagacgacctcattatcactgaagacggcaatgaagaattgatgacggtgactagagaactcattatcttataattaggagaatgtttagcaatgatttcaaccaatgaatttaaaaatggtatgaccattcaatatgataagggcttgtggaagatcttggacttccaacacgttaagccaggtaaggggcaagcctttgtccggtccaaattaaaaaacttgcggacgggagcgacccaagaaatcacctttaaggcgggtgacaaggttgaacaagccatgattgaaagtaagaccatgcagtacctctacgacaatgggggcatgcatgtctttatggatacggaaaactacgaccaggtcgaaattccagagcagttgatcgaggaagagcttaaattcttaaaagagaatactcaagtggacattatcttctttgaatctgaagtcctaggactagacctaccaaacaaggtagagctggaagtgacagagaccactcctaacatcagtggggacacccaaggaggcgggtctaagccagctacccttgaaacaggggcggttatcacagttcctctcttcatcaacaaaggagacatccttgttgtcaatactgatgacggctcttacaactcccgtgcctaaggaaggaatctgaggaggttattcatatggaaaatatacaagggactcgatcaagccggcaatctgctggagcaattgaaatagcaccagaagttttggaagttatctcccacattgcagccaacgaagtagaaggggtctttgccttaaaaggaaatttctctgctgatgtgaaacgtttgtttggtcaatcttactacaaaaatggggtggctttgacccatgaccaagatggcatcagcctggatatttactgcaatctcacttatggtgtgaatgtgccgaaggtagctttggaaatccaaaaaagagtcaaagaccaagtttaccaaatggctgatatcaacctggctgaagtgaatgttcatgtggtctctattgtgaccgaaaatcaaatcaaaaagtctaaggctggagctttaaaggatgactaagccacttgctgtccggagtattgtccgggaaaaagcctatcaaagcctttacctcaaggcgagccggccccaagtttccttggaccaggccttgattcaggttttggctagccagggagaagcaagtgaccaagccagtttaggggacctggtccaagcgaacttgccagaagaataccagactaaagctattgtccaggatgccttggattatttgctgaccttaactgccggggtcttggaccatgaagaatatttggacaagcagattggcccccagctaaaaaaacggagcttaaaccgacttgaccaaaccgaccacgtcatcttgcaagttgcgagttatgaacttctcttccaagaggacctggcccctagtgtggttattgatgaagccatagagctagccaagcgttttaatgatgacaagtccagcaaatttatcaatggggtcttgcaggccattttagacagcaaggaagcaggcaaataagctagaataaggggctttgactgaccagtcacagccccttttagccagtgaaagggtggtcatgtggattacgagtacttaacggtcagccaattaagtcaatacatcaaacggaaatttgaccaggacccctatctagggacggtctacattaagggtgaggtttctaattcagggcggaataggcctaatgccaaccaatacttcagcttaaaagatgaccagaatgtcatttctgttgtccttttcagggacgtggctaaaagggtcaagttcaagcttgaagacgggatgagtgttttgatccaaggacgggtggctacctatggcccgcgggggatctaccaaatagtggttagtgacatccagccagatggtgtaggggccctctaccaagctttagaacagaccaaaaaagctctagcaaaggaaggcttgtttaggtcagaccacaaaaagcccctggttaaattccccaagcggatagcagcggtcactagtgagagcggggctgtcatccaggacattaaaacgaccctagagagacgctatccccttgttgaactggtcttattcccgactagagtccaaggcaagtcagctatttcttctatcgttaaaaatatccgcagggcggatgaatctgccagctttgatacgattatagttggacggggtggtggatccatcgaagacttgtggggttttaacgatgagaaggttgtccgggccatttaccaagcccaaacacccattatttcttccgtcggtcacgaaacggacactagcctgtctgacttggcagcagatgtccgggcagccactccaacagctgcagctgaacttgctgttccattattcagtgatatcaacaaccaaattttagaatatacccgccttttacaccaccatgcccgccgcctggtcgaaaaccgtcgccaggctctggaccgcgttaataagtcttatatcttcaagcaacccaaccgcttatatgaaggctatattcaaaatattgaccacttaaccagtggcctttatcgaagtttccgtcagatattagctcattacaagcgggcaatagatgaaatagaccagaccatcaatcctgaccgtttccaaaaatatatcctatccttgaagctcagaagccagtcacttaaaaaccagttagaccagaatatgaaggatatccaggaccaaaaacaccgggaactagcccaattaacccaagccttagaccacctgtcaccacttgagatattgagccggggttatgcctatgctagccaggaagggcaagttctcagaagtgttgaccaggcaagtaaggaccaaaatctaaccgttagattagctgacggccaactagaaaccaagatcctaagcatcaggaaagagaaaggggcagacaaacatgaccaatgaaaatcagccgcaagatctccaggaagccaaaagtcgaaaggatttggactttgaagcctcccttaaagagttagagaaaattgttgaccggcttgagcagggggatgtccccctagaagaagccttggacaagttccaagaaggcattaagctgagtcggaaactaaagcaagaactagaccaagctgaccaattgctctttgaagtcatgaaggaagaccagggggaagatgaagcagacttagaggagaaggaataggaggatcaaatggattttaccacttttaaggaccgggaaagcctatcctttgaggcctacttagaaggacttttatctcatttaggcaaaacggccctgcgagaagccatggcctactccttttatgcacctggcaaacgaatccggccacttttgcttttagcctgcttggcctcttttggctttaacccccagctaggctatcctgctgctggggcagtcgaattaatccatacctattctttaatccatgacgatttacctgccatggatgatgatgatataagaagggggcaggccagtaaccataaaaagtatggggaagggctagccatcttggcgggagatggtttattgaccctggcctttgagcttatcttatcgactccggttagtgatccgaccaagattaaattgacccagctcttgagtcaaacggctggtcctagtggcatggttttaggccaggctttagacttggctggcgaaggggaagacctctctcttgaccaagtctcggacatccatgccaaaaagaccgggcaactcttgcgttttaccctggagggggccggactgatcgctcaaaaagacccaaatacctgccagcttttaggtaaattgggactggaagcgggtttagcctaccaggtccgggatgatatcttggacctgaccgctagttctagtgacttaggcaagcctagggggtcagaccaagacttaagcaagtcgacttaccctagcttacttggtatccaaggggccaaagaccagctggctcagtctttgcattcttgcttagaactattgaaagaaattgaaaaggccagtcattttgacaagtccatcttagaaagttttatcttaagcttaaacctagaaggtgactgggatggctaagaagatccgggcagaccaagccatgttagaccaagacctcctggacgacctcaaggaggcccaagcccttatcatggcgggtcgggtgtataccgtaaaagaaagccaagtcccaactcctggctaccaggtcaaagaaggaacccagctttatatcaaaagccccgaccacccctatgtcagccgaggtggactcaagctcaagcaggctattgacagctttgacttagactttgcgggtaaaattatcctagacattgggtcttcaacaggggggtttacggatgtggccttaaggcatggggcaggactggtttatgccctggatgtgggaaccaaccagcttgtctggtccttgcgccaggacgaccgggtcattgtaatggaacagaccaattttaaggactgcaagttaagtgactttcgagcgggccaacccgatctagctgtgatggatgtgtcttttatatccttatatcccattttagaaaacttggcccagatcttgccgcctggtcacttggcagttgccttgatcaagccccagtttgaagctgacaaggaagatgtccaaccgggtggcctggtattggatccaggagtccaccgcaaggtactggaggctacgaccgcctttatgactaagctccactactgcctccttggcctcctagcttcacccatcaaggggggcaaggggaatattgagttcatcgccctcctccgtaatgccagtgaccaagaccaggaaattcaacccatgattgaccaggccattgaccagtctttagacctctaagtcaatggtttaatgaagaattgttttatccaagccttgatcttaggcttgaggatacggctacaattggctttaaaaggaatttttgccccaagctttgggatatgacttaaaggttaggctataaattgcttcatgaagaattttcccaagatctgggttaagacttgaaggagagtttgcaaataatataataaggtctaagctctttcgccagatctcgttgacaagcaagctagtcaggaggaatgtcatgcttcaagacttgcatattaaagattttgctatcattgaggaagtggatctgaatttctatgatgggatgacggtcttaaccggagaaactggggccggcaagtccattatcattgatgcggttggtctcttggctggtggtcgtggctcggcagaatttgtccgccacggggctaaaaagtgccaactagaaggtgaatttttggtcctaaacccggataaattcacccccatcttggaccaatttggcatcagcttagaagacaatattctattgatccagcgggaaatttttgccagtggccggaatgtttgccgggtcaatgggtctatggtcactgtggctaatttaaaagaaatcgcttccaacttgattgatatccatggccaaaatgagcaccaagagctcatgcaggcggaccagcacattgagctattggataattacgctggtgaagcaatcaaggacttgaagcaagtcttccaggccaagcgggaagaatacctaaaagttaaaaaaagactccagcaatggcaggccaatgaaaaagagtatgcccaacggattgacatgttggaatttcaagtcaaggaaattgaggctgtcaacttggaagaaggagaggatgaggcattggaagctgaatcccgcaagctagccaacttccacaagatttcccagtctctccaattaagctatgatgccttgcaggcttctgaaggcaatgccgtggaaaaattaggaatggccatggaagagatgtccgatattgcatcggtcaacaaggactacgaagttatatcggataccctatcgtcacttttttaccaggtccaagagactagttccgatattttaaatgagctggaccagatggaatttgatgaaggccgtctgtatgaaattgaagaccggctcaagtcgatccaagagctgaaacggaagtatggggacaccattagtgaagtcttgacctattaccacaatgcttcagaagagctctataatttaaaacataatgaaggcaatatcgaccaggttcaaaaccaggtcgacagtttggaagctgacctggtcgacctgggtcaaaaactccaccaggtccgccaagaccaggcggagcaattggagcaagctgtccttgaccaactagcagagctctacatggacaaggcccgattttcggttgaatttaaaaaaccggcccagctggagaatatgaatgccaatggttttgacactctggccttttatatttcgaccaatccgggagagcctttgaagcccctcaacaaggtagcttctggtggggaattgtcccggatgatgttagccatgaagacgattttttctagttcccaaggtattacctctattatctttgatgaggtggacacgggggtctctggtcgggtagcctcggcgattgccaaaaaaatccacggggtttcggaccagtcccaagtcttatgcattacccacctgcctcaagttgcggcgattgccgatgaacacctctacatcaacaaacaaatagtaggggaccggaccaagacccaagtgagtcatttgtctgaagaagaccgggtggaagaaattgcccgtatgctgtctggagaccaaaccacgccagctagtctgtctgcagcccgggaattactcaaaaaaggcctttagccttaaaatggctaaagggaagagccccaataatgatactaataaaaaacaaaaaggcagggtcccaaaaacggactcctgcctcgattgcctctttaaaagagttggaagatcaagctagctaaaagtgggactaccatggcaatggagataaagatgataaagcccttgacaaaggtagaagtaccactttttttagctttcttttcagcttgtttattaatgtcttttttggttgttttatcggttttgtggcttggttcagaagacatgtcatcacctcttttacatagataagcctagtttagcgaaagcttcccggtcttgtcaagctgtctctctgatgatttaggcagtggggaagcccagtttttgacaagggaaagaaaaattgctaagcttttggatcttatttataataaagaagagtctaaatacgaaagcaatcttgagaggagaagatgatttggacaaacaagaatttggtgtgattgggatggcagtgatgggacggaacctggccttgaatgtggagagcaagggttattccgtttccatttataaccggtctgactacaagacccgggctgtcaaagaccagttccctgaccggaatatccaagcgacttatactatcgaagattttgttgattcactcgaaaaaccccgtcgaatcatgttgatggtcaaggctggctatgccactgatgcaaccattgaatccttgctcccacacctggaccagggtgatatcttgattgatggggggaataccaactaccaagataccatgagaagaagcaaggaattaagccaggcagggattaactttatcggaactggggtttccggtggcgaggaaggcgccttaaaaggaccctcgatcatgccaggaggccaaaaagaagcttacgacctggtcgcaccaatcttggaagatattgcagccaaggccccatctgatggccagccttgtgtgacctatatcgggcctgacggtgctggtcattatgtcaagatggttcacaatgggattgaatacggggacatgcagctgattgccgagtcttatactattatgaaagactatttgggcatgaccaatgaagaaatggcccaaactttcaaagaatggaatgaaggagaattggactccttcttaattgaattaactgctgatgccctgaccaagaaggacccgggaagcggagaatacatggtagatgtgatcctagaccgggcaggaaacaagggaaccggtaagtggacctcccagtccgccctcgacctaggccaacccttacctttgattactgaatccgtcttcgcccgctatatttcggccttcaaagaagagcggtcggctgccgcccaaatcttgcctaagcctgaagccagtcaatttacgggcgacaaggctgacttattggaaaaactccgccaggccctctacttcagcaagatcatgagttacgcccaaggattttcccaaatggctaatgcctcccaggaatacggctgggacctgcatttaggtgaaattgccaaaatattccgggcgggttgcattatccgggcccggttcttagaagacatcacacaagcctatgacaatcaggaagatctaaagaaccttatcttggatgactactttaaagacattgtctctgcctaccagcctgcccttcgtcaaattgtaggccatgctgtccaagctggcatcccaattccagccttttcatccgcgattgcctactacgatagctaccggtctgaacgattgtcagccaatatcatccaagcccaaagggactactttggggcccacacctatgagagagtggacaagccaggtcattaccactttgattggtatggggaccagggggaagtagtcgctgacgactagggtccaggccaaacaattactataaaaaagtaagtctttgccgtgaattcaaaatattttcaaaaagtttggggaaaattaccctaaactttttaatttggtgttaagatataggtgaattttggtctgggaatgtgatagaatgtaagaggaatcacccctatgataatagcaaaattttagtataggagtagagtaatgaaaaaagtattaatcattgaagacgaaaaaaacttggctcgttttgttgagttggaactcaagcacgagggctttgccccaaccgtgaaatttgatgggcggtctggcttgcaagcagctctcaatggagaagattgggatgttatcttgctagacttgatgttgccggaattaaacgggattgacgtggctcgccgggtccgtcaggtcagcgaggttcccattattatgatgaccgcccgtgactctgttattgaccgggtttctggctttgaccacggggcagacgactacttggtcaagccctttgccattgaagaattattagcccggatgcgggcacttttccgccgtatagacatcgagtcttccatccaagaaaagcaaaagactatcttggaataccgggacttggtggttgagaaagaaaatcggattgtccgccgcgatgatgaagtcattgaactcaccaagcgggaatacgaacttttggttgaactgatggaaaatgtggacgtggttttatcccgggaaaaactattgaatgaagtttggggctatgaatcggacattgaaaccaatgtcgtcgatgtttatatccgctaccttcgaaacaagattgaccgtccaactggcgaaagttatattcaaacggttcgaggtaccggttatgtgatgcggacatgaatctaaaggggagagggctgaatatcgagcgactctctattaagtggaaatggtcccttatcatttcggcaacgatcatttttgtctatctgatttttgctatgctggtttattattcgacccagcaggtggtcttagacaaggaaagccaggaaatcgaaattgccatggggaatgccgaggaggtcttaaagcccctccaggaagaagtgaccgaggaaaatattgaagacctggtcaaagaccagcaagtggcggtgaacacctttagggatcggtatgaccaagcagactcccggtctggagatagggagggggccatctccaagctgagcttacgcttgttcgatttagatggcaaagaagtctacgccattggtgccaatgactaccccttccaggtgaccaataagtttatcctccgccccgtcagtgatgaccctaatttttccttgatgggggtcaagcccttggtgtcagagaccagtcaggaaagaatcggttatattcaaattatcaataatttggccagcttccaccatgtgattagccagataatctctagcattttctttatcggccttttagtggttgtcctcagtgtctttttaggcctctttatttctgaccgctttttgagccctatccggcgcttaaaaaatgccatggctgggatcatcaaggagccggaatcagaaaaacgcttgaaagtagcaggttcagatgaattggctgaattagccagcatctacaaccagatgattgaccggatgcaaaagaacattgacagtcaaaagcaatttgttgaagatgtctcccatgaattaaggacaccagtagctatcgtggaaggccacttaaacttattggagcgttggggcaaggatgaccctgagatcttagaagagtccatccaagcttccgtccaagaaatttcacggatgaaaagcctggtccaagaaatgctggacttgtctcgggctgtccaagtagatatccagtacaaggatgagcggactgatgtcaagcagttggtctctcaacttcacaataacttccaattggttcatgaagactttacttttaacctggatattgatgtggaaggggaagccattgtcaatatgtaccgcaaccatttagagcaggttttgatcatcctcttagacaatgccgtcaaatactccaaggaccgtaaggaagtccacctgtctttggcgaccagtggcgaccgggtccaaatagccgtccaagactttggtgaaggcatcagtgaagaagatagccagaagatctttaaccgcttctaccgggtggacaaggctagaagccgggaaaaaggcgggaatggtttgggtctgtccatagccaaacaattgatcaatggttacggcggcactatttcggtcgacagtgtccccggccgcgggtccgtcttccgtattgaattaaaactccttcaaaaccaggctaaagaccaagactccactgattcaaaggggcagaaaaaagaataaagaaaaagctttgagctcgtgctcaaagctttttgtgtcttaactattgctgggaccggtggtggtcttgtttacccttgttccggtttcggtttcgctgtttttgtttagccagtttgtcttcttgcttgtcttggccactgactgagccagcttggctagttgaggtttgggtttttggtctttgtcgccgaccaacaacttttttgtccccatatttttccttcaattgggcttcaagtttgggtttaaagaagttgtttaagtagtaggattggaggatgcctaagatacctgaggtcaagaagtagagggttaagcctgaaggagaggttatggcaataaagaccatcataacgggcatcataagggtcatgccaccgccaccaggggcttggtctggcattcgtttttgcatcatcttggactccataaagtagaggccacccgtaatgagggctaggaggatgctgggagaccctagttggatgcctaaaaattcagttgaagcgatggcttcagagtagcggaagacatggaagatagcaatgaagatgggcatttggataaagaggggcaggcagcctgccatttgcccgaagacattgatatcattgtcccggtaaacttgcatcaactcttcgttcaattcttgcttacgggctgggtccttggtttcctttaagtcagcttggatctcgtcgataatcggcttgatatccgccatctggatctgagacttcatcatggatctttgttggtttaaggtaattggcaggaggatgatccggatgataacggtaatggcaataatcgccaaaccatagttaccaaagaagccacccagccagtccaagagagcctccatggggactaccaagtagtcgtacatcaattcagagaaaaatcctactggctcattgttctcatccaaccgcatacagccagataagaagagggttgttaggacaagactcgcagcaaacaaccatcttttatatttctttttcaaatttgcttcaccctttatctatagtatggttgggcctaaagccacaagccttatcatagctgattggagggattttttcaattggcttgggtgaatttgtctctttccttaaggtcaggggcataggtgacttcaactcggtccacctgggctgctggggaagggccgagtcggagccgttcgataaattcatccatggtttcagggtcagcattagcttccacatagacgttgccgtcactttcattacggacaaggccaccaacgcctaactcttgggctgcctgttgggtagaaaaacggaagcccactccctggacctggccagtaatttgggcggtgattttgacctggccatccccgcttggtcggtcattcaggtagctgacttggccatttgactttcggttttttcctttatcaaaaaaattatctagaatagaagacatgagagacactcctttgcatcattttatccattataaggaaaatcggctgtcatttcatttcatttttggtatttctgttcaaaattttagtgaccggcctttttaagcaggtgaagttggctcaagacttatctttctaagctcggtggcgcataggtcttattaagtaggggggagttggccttgcttatgatgcgacacttgaatgaagttagctagtcttattaaataaggggaagctgaacttcccttggtgacctggctgttatatttatacgacctggtattcatgctataataatttcgattacgtagattaggagacatgcaagatggcaaaaaaaagacgtcgaagcagtaagcgacgtaaaaaaagacaatttccaacagaagtcataggcatcgtccttgtgttagtcagtgcctttgcagtaggccaatttggttttctaggtactttcctggctaatatcttaagggccttaactggggagtcttatatcatcctggctggggccattatctttattggtctctatgctatttttaaaggaaagttccccaaactgaccaaccgggttaacctgggttttttactggtctacctatctgttttaatctttatgcactggcattatttccgtgatttcgtgggaggcgagaccagcttaaccaacctgacctggcaggccataagccaagaggttttaaccaataccattgaattgaatctgggagggggaatcatcggggccggattttttgaagtcttccaattactcctgggttctccagggaccttcctggttatcttcctatccctctttgttgggattatgaccctgggcgacttttcctacaatatatttttggaatctactcgagatagcttggtccaagccggtaagtggttgaaccaagtcttttctagagccaagagcaagcaagcttcaaaaaaaagcaagtctaaaaaggccaaaaccagcaagcaatctcaagcaaaagaggatcccaaggctaaccgtcaagctagttcagctaaagacctcatggcccaggaagcagcatcagctagccaagaaactagtcaagaaaaatctgcactagaaattgaatccgtctatgggggtcctgcagccagccaccaggacaagcctgatactgaggggcaagaacaggctagcccgcttcaaaaagaaagaagtcaagaagaagacaatgccaactcggacattggtgacttggacatcagtgaggaggaaaatacagattacaaactaccgcctctaagcttgctagacccagtgccagaccaagaccaaagccaagaattcaatacaattgaagccaatgttaagaagctggaagacaccttccaaagctttggggtggatgccaaggttgtcaaggccaaccttggcccagcagtgaccaagtatgaaatccaaccagctaccggggtcaaggtgtctaaaatcgtcaatctttccaatgatattgccctggccttggctgccaaggatatccggatggaagcccccataccgggcaaggcagtgattgggattgaagttcctaataaccacgttaacatggtctccttccgtgaagtggttgagggcagctcagaggactctactgaccccttggaagtggcgattggccgggatatcgccggtaatattcagatcgccaacctggccaagatgccccacctcttgattgcgggggctaccgggtccggtaagtcggttgccattaatggaattattgccagtatccttctcaaggccaaacccaatgaagtgaagttgatgatgattgaccctaaaatggtagaattgaacatttataatggaattccccacctcttgaccccagtggtaaccaaccctaaaaaagcggcccaggccttacacaaggtggtccaagaaatggaaagacggtatgaattatttgctgcctctgggactcggaacatggcaagctacaatgagtttatccaagagaaaaaccaggcaaaagatggggaggcaggcttgcccttgccttatattgtggtcattgtcgatgagttggctgacttgatgatggtagcttctaatgaagtagaaaatgccatcactcgactagctcaaatggcccgggcagcgggaatccacatgattttagccacccaaagacccagtgtggatgtcattacgggagtggtcaaggctaacatcccttcccggatggcctttgctgtttcttccgggactgactcccggaccattttggactccaacggggctgagaaattactgggccggggcgacatgctctaccagcccatgggagccaacaaggccagccgggtccaaggggccttcatttccgatgatgaggtcaaccggatcgtcaaccacgtcaaaaaccagcaggatgccaattacattgaggaaatgattccaactgaccaagactcatctggccaagaagaaccagaggacgaatactaccaagatgcggtggaaatggtggtggaattgcaaacagctagcatttctctcctccaacgccggtttaaaattggctacaaccgggctgcccggattgtcgatgaaatggaagcccggggcgtagtcggtccccatgaagggtctaaaccccgacaagtcctccttgaaagcctagattcagacccagatgacccaagtcctaaccaagtttctgaagacccagctgatccagcagactagaccgggctaacctgattcaaaatggatgctttgtcaaattcccaaaggtaaaaagtagggcagagggattttcggactaaatgaaagattcaggctagtatgttgtaaaatgactgccagaagaaaaaatatgaaacgaacaatgcattaaatgattaatgcattgttcgttttttagtcatttttgaccaagcttgtctatttcataacaatgtaagcgaaaacaaactgattattttttctgcttttgtataaaaaaacctttacatttcttgctattgaaagtatgatacttatagcgttacaaaaaatttacattaaatagattgatggaggtttatgatgtcaagaaaattaaaaagccttttaggcctagctgcttcttcaatgcttttagcagcttgccaaggacaggatgctggtgaaaacccagaccaagaccaagcccaaaaccaagaacaagaccaaggtcaagaaggcggtggtgaccaagcaagtggtgatttttccattgccatggttaccgatgaaggtggggttgacgaccggtcctttaaccaatctgcttgggaagggatgcaagagtggtcagacgaaaccggcaatgaatctacttacttccaatctgatgatacttctgactttgtccctaacttgaaccaggccatccaagggggctacgatatcgtttacggtatcggttttatgctccgggactcaattgaagagatcgcccaacaaaatgaagaccaatactttggtatcgtagacgatgaagttgacttggacaatgtggtttcccttaactttggagaccatgaagcttctttcctagctggtgtggcagcggccttgactactgaaaccggtcaagttggttttatcggcggtattgaaagtccaattattgaccgcttcgaaactggctttttagctggtgttgaacacgtggacgacaccattgaagtggacgttcaatatgctgagtcctttggggatgcagcccaagcccaacaaatcgctaacggcatgtactcttctggggctgatattattttccacgcagctggtgctgcagggaacggcttgtttactgaagctcgtaaccggatggaagacgtgtctgacacacaattatgggttatcggagtagaccgggaccaagaagctgaaggtgaatggtctggtggtaatttaaccttgacttctaccattaaagaagttggcaatgccatcgtttcttcagttgaacaaacccagtccgaaggtttccctggtggtgaaaacatccaatacggtctagccaatgatggtgtagatattgtcgaagggaacatggaagctgatgtttgggaagaagttcaaaatgtccgccaacaaattctagatggtgaaattgaagtgcctgaattctcccaagaatgggattctgaagaataggaactgattaagagtttttgcccaggtcctactgggttaaggctaagtcttgagcaaaaaatgaagcgctagtctcatttaaggctagcgctttttttgagaaagttatactatagaagcaaggaagttaaggagggattcttttggctcaaaatgagaatgtcattgaaatggtcgatatcaccaaaaaatttggtgactttaaggccaatgacaaggtaaatttgcaagtcaaaaaaggggaagtacacgccttgctcggagagaatggggcaggcaagtctaccctaatgaatatattatctggcctactggaacccactagtggggagattcgggttaaaggggaaaaggtatccatctcttcacccgaaaaagcccgccaatacggaatcggcatggtctaccaacactttatgctagtcgataagtttactattaccgaaaatatcatgttgggtcgggaagagcacaagtttggctacatagaccaaaaggctgcccgtaaacggatcgaagacctgtccaaccgctacggcctgaaggtcgaccccaaggctgtcgtccgggatgtttcagtcggcatgcagcagcgggtggaaattatcaaggccctttacggtgggtcagatatcttaattttagatgagccaaccgccgttttaaccccccaagaaatagaagaattgatggagattatgcggaacatgaccgctgaaggcaagtccatcatcctcatcacccacaaattagatgaaattaagcaggtggctgaccggtgtacggttattcgccggggtcaaagtatcgatacggttgacgttaaatcgacttccagccaagccctagctgatatgatggtgggtcggtcggttaatttccgggtggataaaaagccagccaagcgtaaggaaatcgtcctatctcttgaagacttagtggtcaaagattccagaggtctggaagcagtcaagggtttaagccttgatatccgagccggtgaaattttagggattgctggtatagacggcaatggccaaagcgaattgatccaggctatcgcaggtttaaaacccattgaatcaggcgaaatcaacctcaacaagtttgatattaagaacaaaaagcccagacaaattaccgaacaaggcctcggccacattccagaagaccgccaacgctacggcttaatcctggacatgaccctggaggaaaatttagtcctacaaagctattatcaacttcctttctccagtggcggtatcctcgatcatgacagcatcaaggaacatgctgagcgtttgattgatgagtttgacgttcgctcacaaggacctaaggaaaaagcccaagccttgtcaggtggtaaccagcaaaaagccattattgcaagggaaatggaccgtaatcccgaactcttgattgcagcccaaccaacccggggcttggatgttggagccatcgaatatatccacaaacgtttggtggaacagagagactcaggtaaggcagtcttgctcatgagttttgaactggatgaggtcttaaatgtttcagaccggatcgccgttatgtatgatggcaatattattgcaacagttcaagcggaccagaccaatgaaagtgaactgggcttgttaatggcaggggttcccctcgaccaagcccgtgaccaagtcaaggaagaagaaggacgggaggcagaaaatgttcaaagcagaaaataggaacttacttcatgcgattataatccccctcattgccatcgtttttggttttattcttggggccttaatcatgcttttctttggctacagccctcttgatgcctacaatgccatgctatccaatgtcttaaccaatccgtatttcttcggtgaagctttaagacaggcaaccgtcctcaccctaactggacttggctttaacatggcctaccaggcaggattctttaatattggcttgtctgggcagttgctgatgggttggttgtttgccatctggtttgccttgcttttcccggacatgccgaaaatactagctgtccctgtcttcctcttggtcggtttagtgatcggtgctttatgggctgggatcgcaggcttccttcgagcttattttggtaccaatgaagtcattgtgaccattatgctgaactatacagccctccacttttccaattacatgatccggaatgtgctagctacggggaaccggaccgaaattgttggtgagaatgccagcttggctctgggtttcctaactaatttgacagctgggtctcgacttaacttaggcttcttcctagccattctttgtgtagtcctcttttggttcttgatgaaacagacgactgctggttttgaacttcgggcagttggcttgaacagtgatgcagctgaatacgctggaatgagtaccaagaaaaatattatcctagccatggtcctcagtggggccttggctggtctgggcggggccatccacggcctgggaaccttccgtaatattttcgtccaatctgccttgcctcaagaaggctttgacgggattgcggttggtctacttggcttaggcaacccatttgggaccttcttgtcagccattttacttgggatcttgaatattggggccggttttatgccaaatggtgccggtgtgccggatgagctagccgatgtaattgtagccggcatcatcttctttattggtgctaattacatcatccgacgcttatttacccggtcaagcaaaaaaggaggtcaaatctaatggatgtcctatcgcttttacaattaatcgtgtcttccagtctcatttatgcagcacctttgatttttgctgccttgggcggagcattttctgaacgttcagggattgtcaacattggtttggaaggtattatggtcattggggcctttgcttctgccgttttcaacctggaatttgccagtcaattaggtccttggaccccctggatcggacttttagtcggcgggctagctggtctaattttctccttgctccatgctttggctaccgtccacttccgggctgaccacattatctcaggtaccgcccttaacatggcagcaccgggtcttgcagtctttttggtccgggctatttatggagccgctcaaacaggtccactgcctcgccctttaccttcccaaacttttccattaatcagtcaaattccagttatcggggacattttctttaccgggacatcaggaccagcctacctgggtgttttggtagccgtcttagcctggtttatcatctttaaaactcggtttggcctccgcttgcggtcagttggagaacaccctcgtgcagctgaaaccatggggattaatgtttacttaatgaaatattgtggtgtcatgctgtctggcttactggctggggtagggggagccatcctgtcccaagccatccacaatgaatttggtttcttaaccgttaccggtcaaggctttatggccctagcagccatgatcttcggcaagtggaaccctcttggggctatgggggcagccatcttctttggtttcgcccaaagtttggctaatactggtaattacatccctatcatccaagatgttccgacagtttggttgaacattgctccatacctcttaaccattatcgttcttgtcgtcttcattggtaagtctgaagctcctaaatacctaggcgacactttcgtgaagagcaaataggggagcaggcaaaatttatagaaaaaaagcagctgtcactttttagtggtagctgttttgtttggcttccttactatttgagcttggtgacacccaaatcaagttcaaatgaagggtccttttttctgccctagctggcttaaattttttaaagttcggttggtcagctaattttttcaaaaataaagccagcccttttttgcgtatatactagtaacggtaaaaagaaggtgagattttggaaacgagaactgtagataataaacagatgatggacaggaagttaaactttattcggcagcctagccgagaactgcaggcagaagtggtaaaaactttgcgaacgaaggctttcgccagcgatgtccaacgactgatcaagggttttgctggcgaaaggcaatttgatgagatttattcgactttcgcccaggactcctgggactatcttacagattttcattttgaattgggaactttgccccagctggatgccattttaatcactcccggccatatccatgtttacgaggttaaaaattatccggcttattgtcaggtccaaaatgatattttttcctacaatggccagccgcttgccagcaatcctttcaaccaggtgagggccattaaatcccggtttaacagcctgctgtctttgatcggctaccaaggccaggcaacttaccatctggtcatgatcaataaggactgctattttaaagaccgggaccaatttagtgatgtcttgatgcgcaacgaacttaagcttcatttccaaagcctacaaggcgcctcttataaaaagaacccgtcaaacttgttggaaaaaataaagcggtttgaaaccgacaatccttaccacaaaaattatgcttttgattatcgggacttgcccccggggatcctgtgctacaagtgcggatctttggacacttatccgtcttacaaacaaatcaagtgccgagactgcgggcatgcaaggagcaaaacccaggccttgcagaacttaatcggcgaactctctatcttggaccagaacacccctatccgaacccatgatatccaccagtatagtggtgggctgttgagtaaaaggtttattatggatagaatttcgcatttactaaacaaaaaattgcctaaagctcgtcactatgtaccatcaacaaaaatgtataatttttctgccctttataagattatccatgataaatttaatatctattgatcatcgttccttagaagtagacaatgctaattagtatttactgcttagtaatctacaataaggaactttttctttaagttaactgctccagcaagtttaatagcattcgacagctttactaataaagtcagagttaggttcggtaacgcgacaatcggtgagcaatagaggagttctggtgcaataacgcgacaatcggtgagcgataaacgacttctggcgtaacaacgcgacaatcggtgagcaataaacgagttctggcgtaataacgcgacaatcggtgagcgataaacgacttctggcgtaacaacgcgacaattgtcggccgataaacgagttttggcgtaacaacgcgacaatcggtgagggataaaggagttctgaagtaataacgcgacaatcggtgagtgataaaggagttctggcgtaataacgcgacaattgccggccgataaccgagttctggcgtaataacgcgacaatcgcgggccaataaacgagttgtgaagtggaaagtcagttatagaattaaatgacatattcctactcagcaaaaaaaccggtcaaagtaaatagagaagaaaaagcaggaagtggagctaagttaaaataggatattggtgaataaaatcaccaaccgttaccgatctatgaattttcatccaccttatcttcccaagccttatgccaacttctcaatggccagaaggtagggtggcgtattcttctggtttaggggttggtacttaaagacagtgtaattactttggtctaagccttggaggtagacttctaattcttctttttcgacttgaccctctgaatgaccggcatagaccatcagggtcattaatccacctggctggaggatgtctaggcctgcttcaacagccttgatggtcgtttgggcttgggtagttagggttttgtcgctacccggcaggtaacccaggttaaaaacgatagctttagcagaatcgttgtggcaataagaagccatgttttcatgcccagctaaaaacaaagtggtttttgctggacaagattcagcttctagtcgttcttgagtttttgccagtgcttgaacttggatatcaaagccaataagtttcccttcttttcccactaagttagataaaaataaggcatccttgccattcccaagggtggcatcgatgaccaagtcacctttttcgacttggtcttgtaaaagttggtggctaaaagctagggcattttttaacattatttgcctcctaaaaatatctttattcctatttataacgaagagatcggtcaaaaagcaagcgttgtatatttcatttcctttacatttataacaattgtataatactacttcctaattatccttataatttgtatactttacttgtattaaattatgattatgaggaaaagggagcggatgaacggtgaaactatcgcatatacataattttaaatttaagacggctttaaccttggggattgcagcgggaagcctggccctggggggagcaatgaaccaagtttctgcccaagaagaccctggtcaagaggttagtactttacttggtatatacaagtcttcaaatgaccctcaagtccaggaaaatttgaagacccaaattatcaaccagatcttaaacaatggtggggcgaatttaattggccacctcaacattgctgagatgactccggcggaattggaaaatgtagcaaatgcctttatccaatccgtgaatgcaaataaccaagctagtcaagaacaagcggaagacgaaagttcaccagagccggaagaaccggttgaaagagatgaaaaagctgacttagaagaagctgaagcagaagaaactgatgattctgtggaaaacgaagaagacaaggcggaagaccaagagcttgccaatcctgaccaagaaaaaccggacgaaactgaagtggcacaagaccaagaaaaaactgaagtcactgaagaagaactagttgagcctgaaaacttagaagaccaaggtcaggatccaaaccaacaagtccaggctaaagaagaaccgggtttgagacaggttgacccgaatgcccctgccctcaaaagctcccaagcccaagaccatgtcgttcaaccaggtgaaaccctctacagtatcgctcgggactacaataccagtgctgaaaaattagctgccattaacaatattaataatccaaataacttacgggtaggccaaaccttgacccttcaccaagcgaatgtggacagtgctgggggacggagagactttgagatccaaactttcgccgctacaccagctccacaagagactattaaaactggtaatgaattcattgataatatttcggccgaagcttcccaagtagcggacgagtacaacttgtatgcttcagtgatgattgcccaagctgctttagaaactggttacggtaaaagtagtttgtcccaaccgccacaccacaacttattcgggatgaagggtagttacaatggtcaaacggctaatttctcaacccaagaagacacccaaaatgggatggttaccatccgcgacaactttagaagctaccctaactacactgcttcccttagagactatgctgataagttacggaacggtctttcatgggaccctaactactattctggtacttggaaagaaaataccaatacttaccgggatgcaactcgttggttaactggtcgttatgcaactgaccgtaactacgataaaaaactaaatagaattattgaacaatggggacttaacccggtttgacaatggcccagttccagctaacaacacaaatactgttccagttgacaacgacaagcaaaaaggccaaagatattactcggcaaacccaagccaaacttccgctggcacttatgtagttcaaccaggtgacagcctctaccggattggccaaaactacaatgttaccgttggccagttgaaaaactggaacaacttgaccagtgacctcatccacccaggccaagtcctccgggttgcaggaccaagccaaggcaaacaagccccaagtacaccggctaaaccaagtaagccagcccaagctaacaagccaagtcaaacaagcaaaccaagtcagcctagccaaaacggttctcaaacaagctcccaaaccacctacaccgtcaaaccaggtgacagcctttaccggattggccaaaaccacaatgttaccgttggccagttgaaaaactggaacaacttggccagtgacctcatccacccaggccaagtcctccgggttgcggctcctagccaaggcaaacaagcatcaagcacaccggctaaaccaagtaagccagcccaagctaagaaaccaagccaaacaagcaaaccaactcagcctagccaaggtggttctcaaacaagctcccaagtcacctacaccgtcaaaccaggtgacagcctttaccggattggccaaaaccacaatgttaccgttggccagttgaaaaactggaacaacttgaccagtgacctcatccacccaggccaagtcctccgggttgcggctccaagccaaggcaaacaagcatcaagcacaccggctaaaccaagtaagccagcccaagctaacaaaccaagccaaacaagcaaaccaactcagcctagccaaggtggttctcaaacaagctcccaagccacctacaccgtcaaaccaggcgacagcctctaccggattgcccttaaccacaacaccactgttccccgtttgcgggctatcaacggcatcaaaggtgacttgatccacccaggtcaggttatccgcctaagtgaaggccaagcaactgcttctagctccaaacaacagtcggctcaaccagcttccaaccaaccagctagtcagacttacacggttaaaccaggcgacaccctttacaagattggccaagaacacaacttaagtgtggctcagttaaaagacttgaaccaacttactggtgacttgatccacccaggccaagtcttgcgtgtctcccagtctggtcgcaaaccagcccaaacagtgaaagcaagcaaaaagactaaccagtcaactagccgaccatctggcctagctgtcacttataccgttagaccaggggacaccttgagtgccattgcccgacgctacaacttaagtgtcaaccaactagtggcttggaacaagctagaaaaccctaaccacttgagtgtgggtcagactttagtcttaaacttacgaacagatgctaaaacgagtgtgaaacctcaaaaagctaaccggtcaacctatactgttaaggcaggggacaccctctaccatattgcccgtcaacatggtactagtgtagctaacttaaaagcattaaacggcttaactagcgacttgatcttggtcggtcaagaactgcgggtcaagtaaatttaagtcttgcttttaaatgaatagtctgttagaatattatcatcactttaatagaataaacatttggaagtagtaggtgtatgatccttttagagagcgcatggtcgctggaaatgcgtaggttaagttactgaactcgtccatattcttgcaagggtcaagaccatctagcctttgccgtagactagcgttaatagtttagagaaggtgggaaagccaattttcccactaaaataggtggtaccgcgagaatgtataaacgccctatggattgactccaatccatggggcgttttttcttaaagaaaggaagatggccatgtcattcaaccacaaaacaattgagcacaaatggcaggatttttgggaaaaggataaaacctttaaaaccctagaagatagtgacaaggaaacttattatgctctggatatgttcccttacccctctggtcaaggcctccacgttggccacccagaaggttataccgcaactgacattatttcccggatgaaacgggcccaaggctataatgtcctccaccccatgggctgggatgcatttggcttgccggccgagcagtacgctattgatacaggtaatgatccagctgactttacccaagccaatatccaagtttttaaaaaacagattaagtctttaggctttagttatgattgggaccgggaaattaacaccacggacccagactactacaagtggacccagtggattttcaaaaaattatacgaacatgacctggcctatgaagaggaagtggccgtcaactggtgtccggccttggggacagttttagccaacgaagaagtcattgacggcaagagtgaaagagggggccacccagtttaccgtaaacctatgaaacagtggatgctgcggattacggcttatgccgaccgcctcttagaagatttgaaagacctggactggccagaaagtattaaagaaatgcaaagaaattggatcggcaagtctgagggggctgaagtcagcttccaagtcaaagacagtgaccattcttttaccgtctttaccacccggccagataccctctacggggcaaccttttgtgttttagctccagagtccaagttggtgaaagatattgtgacagcggaccaaaaagaagcagttgaccaatatgtggaccaggctgccagaaagtctgacttggagcggactgacttgaacaaggaaaaaagcggggtctttactggggcttatgccatcaaccctgttaatggaaaggcaatcccaatttgggtagctgattatgtcttgatttcatacgggactggggctgtcatgtcggtaccggcccatgatgagcgggattatgaatttgccaaaaaacatgatctcgatattatccaagtcctagaaggtggggacattgaccaagaagcctatacaggtgacggccctcacattaattcagatatcttaaatggtttaaaccaggaggaggccattgacaaggtaattgaagtcttagaagacaagaggactggacaaagacaagtcaactaccgcttgcgggactggctctttgcccgccaacgcttctggggcgaaccgatcccggtcattcactgggaagatgggaccaagagcctggttgatgatgccgacctgccgcttgagctacctgaagcagacgatattaaaccatctgggacaggggagtcacctctggccaatatcagtgactgggttaatgtggtagaccccgaaacaggtaaaaaaggtaaaagggacaccaacaccatgccacagtgggctgggtcctcttggtacttcctccgctacgttgacccccacaatgaccaagccatagctgacccagacaagttggccaagtggcttccggttgacttatatattggcggggccgaacacgctgtcttgcacctcctttatgctcgtttctggcacaagtttctctatgacttgggtattgtcccaagcaaagaacccttccaaaaactttacaaccaaggcatgatcctaggggaagggaatgaaaaaatgtccaagtctaaaggcaatgtggtcaaccccgatgatgtggtggaagcttatggggctgacaccctccgtctttatgaaatgtttatgggacccttggacgcttcagttgcctggtcagaagatggattagaaggagcgcgtaagttcttagaccggtcatggcgactcttaatagatgaggaagatcagctgcgggatcgagtgaccacctataatgatggccagctggacgtggtttacaatcagactgttaaaaaagtgaccgaagactttgaagatctccactttaacactggtatttcccagttgatggtttttgtcaatgaagccaacaaggcagaagccttgcccagttgattacatgaaaggctttgtcaaactactagctcctgtcgcaccccacttaggcgaagaactttggcactacttaaccaacagtgacgaatccatcacttatgagccttggccaaattatgatccagaaaaattagtttctgaccaagtggaagtggttttccaagtgaatggcaaggtccgggccaaagaccaaacatctaagtccatttcaaaagaggagcttcaagaacttgcactcgcaaaccccaatgtccaaaaacaattagaaggcaaggaagtagcgaaagttattgtagtacctggtaagttggtaaatatcgtggcaaactaagctatgaagtgaattttcaaatagtaaacaggtaagaggcttcaaattttggagtctctttccttatgcttaatttaggacttaataagtgaattggatgactggataagggttttaaataaagcactttataaaatatagtgaactttctaaagaattgattaattctactgcaagcaattgaatcctgctagggaaagaagtagaatgaacaaataaaattgacaaaaacgtatagaaaagtgggtatagagtgagtgaaaatgatgaccgaaaataaaatagaaagaaaagaagaccgcgagccatcgcttgacaaccaaatcctaactgggtcggcctggatgacggttgggagcatggggtcaaggatcctaggagccctctacattatcctctggttctcctggatgggagggggtgagacagcagcggctgccaacggtctctaccaaatggcctacaacccctacaactttttcctgatgttggctacagccggtattccttctgctatctctaaatcggtctcccgctacaacgggatgcaggaatatgaaacagccaaggccatctacaagcagggactgaagattatgcttttgactggagtcttgtccgctgcttttatgtatttcttcgcaccttggtttgcccggactggtccttcagctgatgtatcggacgggatcgtggtcatgcgggccctaacaccagccctcttgattatccctgccatgtcggtcacccggggtttaatccagggtcatagccggatgaaagaaccagctatttcccaaattgtagaacagttggtccggatcgtctttattctggctgctgtctaccttatccgccaggtctttaatggcgagccagttacggcggttgccatgtcgaccttcggggcctttatcggggctgtggcttcttttgcctacctttatttccggatgaagaccatcccaaccgtctttgaccggagccctgaagagagtttgaaccaggttcacgtttcccctaaacaattgatttgggagattattaaaacctccatcccatttattattgtgtcaactggtgttattatcttccagatcatcgaccagcagacctatgccccattgatgcgggtcttttcgagcttgtctgatgcagacattcagattacttatgggattacccaggctaatgcccacaaattatccatgatcttgacttcctttgggtcagccttggccattacgtctgttcccctcatttccaacttaacggcccaacacaatatcaaagaagttagacggcaattggtcaaggggatcttgcttttaatgttcattattttacccgcttctttggggatgttagtggtggctgaaccgctttactctttcttctatgactatagtgacctaggctaccgggtgacacaagtttatgctattgtcaccattatcctagctctctacattatgcttggtaacatttgccaatcagctaacttgcaacgaccagctatctttgcggtggggctcggttttgtcatcaaaattgttacccaaccgctctttatttggatggccggaccttatggcatgctcatttcaacctttatcggcctaggtctgacttccgccttgatgatgagagccctctacaatgaaactcgctattcccttaagttcttgtttagacgctttctcctgctcttattgatgtcagttctgatggctgttgttgttttagtctttagagaaatcttaagacccttcctagactaccacaatagtttccaaggactgatcgctaccggtattttggccctagttggctttctagtttacatgtatatggccttaaaattgcgggtagccgaccgcctcttaggtgacaaagtggccattgttcgcgaaaaactcaacattaaataaaacattaaacctggccctcaagtctcagacttttggaccaggttttctttaactttcaacttttagtatactagttgtgaaaggcgtgatttcatgcgactcgataaacttttagcccattctggctttggcacccgcaagcaagtcaagcaattgatcaaggaccaattagttgaagtcaatggccaagtgaccaaaaaacacggcgacaaggtggaccctgactcggacaccatcactgtctctggtgtcccagtccactaccaggaatttatctaccttatgttaaataaaccccagggagttatctcagcaacccaggatgacttccatgaaacggtggtggacttactggagcctaatgacatcttgcaagacccccacccagttggccgtttggatattgacactgagggtcttttgatcctgaccaatgacggcaagctaacccacctcttgacttctcccaaccgtgatgtagaaaaggtctatggcgctgtggtagaaggcttgattggcgaggaagaagtggcaaaatttgctagcggtttgaccctagatgacggctaccaaaccaaaccagcccagttagagattcttgaccaagacccagaaaacaacctaacccaggttcaagtcaccttaactgaaggcaagtttcaccaggttaagcggatgttccaggcagtagatagccaggtcatctccctcaagcgtctagctatgggatctctaactctagaccctggcctagaagcgggcagctaccgggaattgactcaagcagaagtggatcagttaaaggcagaataaagataaaaaccaggacttggttagctaggctagttgggttctggtttttttgttttttgtcaagtgtgttggtgaggcagaaagagaggcggtcaatccggactgggcctctgcctagtttagtaatctcttggaaagacttaccctttgtaggtgacaggcgacaatgggaaagtcattcggtacttttggacttaaaactggacaataaatagaaatagggtggttttggatttaaaactggacaataaatagaaatagggtggttttggatttaaaactggacaataaatcaaaataaggttgttccgtattgaagccgcaaaaaaagtcagcaataaggagtcaggtccaaagctttgttcaagtctgtcaaggtttaggagccaaccaatgacaaatgtttttctaaaattctggaattgttcggcgattatagaattaccaaatcaagtccaaaacgcgacaatcggtgagtaataaaggagttctggagcaagaacgcgacaattgctgagcgataaaggagttatggagcaagaacgcgacaatcggtgagcgataaaggagttctggagcaagaacgcgacaatcggtgagtaataaaggagttctggagcaagaacgcgacaattaaggagttatgaagtaacaaggcgacaattgctgagcaataaatgagttatggagtttgaaaagtcataaactacattaaaagacaagttcaccaagtaaaaatgagccaacacttctacaataaaaacagctaccaagtcgcggtagctgtttaaaaagacgctagttgattgcttcaccaagccaaatagtttacaagcgatcattttgatagtaaaggctttgctcctacttcacgtcaaatggtgaacaatgggttaaatgattagcaaggatcaagtcaatgattttgcaaactactggttctcccaaaattacttacaagatcaaacccaaaataccgcctaggccgtaagagaaggtcaaggtggtcagtagcaccaggatgcgcttggaccggtttagctctctttcgtcaacagtcttagaagggcgaggggtctggaagaaaataaggaaaaagataataattaggcctaggaagtaaatttggatcaggtattcaaataagaggtaggagaggggaatggccaccaaggctaggaggccatttgtatatagtggtttcaaaatatcattccttctcgtcacgcattccggaggcgacctagtttaacttggtcaagtttgttggatagtcagctcggtcgagaccttgcttatcttacatgtccttttcgtcaccaatcctgtacgtgactttgttaactcgggcaagtcctattggtcactcaaggcagcagtgaccttaattacttgggtgattcctgttagtcattcatccgggctgaaccttgttaaatgagacaagttttaatcaccacacccggtcacgatcttcttcgttactcaacttggtcctggccttgtttgacctggacaaaggccttcatgcaggcggggatttcggggataatgctggagggcaagaccaggtatgaccgggttgccaattggtcggcaatgtagctgtggataaaaactccagtcaggcaggctgtttcaaaatctggatactggcctagaaggccggttataatgcctgctagggtgtcccccatgccaccgacagccatggctggattaccagctgtgttttggtagacttggtcgttggtataaacctgggttcggctttgttttaagaccaggagggccccaatttttttctgccaatcactgctttcctgccagcttgacgaagctaggtctaaaccagttaagtttttccactcgccagggtggggggtaaggatggttttttctggtagtttaatttgggagacatcgtactggctaagcagataaaggccgtctgcatcaataaccaagttttgctggtcgttggtgtggctgaggaccaggtctaataagtcctgggcgtgttggtttcggcccaatccaggaccgattaaaatagtgtcactagcctggagtttttggcggacctggtctttatcagtccagtccaggcacataacttctaaggctgtctggtgtaccgtttggaagttttttggatcagtagcaactgttaccaggccggctccagaataaagggcagctgaagcagccaggctgatcgccccagccatttcagctctgccgccaatgcataagacccggccgtaatctcccttgtaggaatcgtttggccgtacgggaatatttgaagccaccatttctttgctgatggggataaaagggttggcttggtcttcttgctgaggattactttgggcattattgttagtcatcttaacaactcctatcaatatatttaattatatcgaaaaaacatgttaagatatagctatggatacttctgtaatagaataaaccaaaagattgcgaggaatgttaagatgtcaaaccaagaaattaattggaaagaagaagttaagaagtaccaggacgacttcttagctgatttaaaagaagtcctaaaaattgactcagtccgtaacgacgatgaagcgacagatgaattcccggttggtccaggaccagctaaagccctccacaaggccttggaaattgctgaccgggacggctttaccactaaacaagttgaaaactgggctggccacattgaatacggctcaggcgatgaaaccctaggtattttaggccacatggatgtggtccctgttgggtcaggttgggacactgatccttttgaccccgttatcaaagatgggaagctttatgcacgcggggcaagtgacgacaagggacctactttagcagcctactatgccctcaaactcattaaagacttgggactgccagttaacaaacgcatccgattgatcttaggaacagatgaggaaagcgagtggcaaggtgtccaccgctatttagaagtagaagataccccagactttggcttctcaccggatgggaacttcccaatcatcaacggtgaaaaaggtcagtatgaatttgatattgaaacagatgccgacaataccggcgacatcagcttgatttcctttgaagctggcctgcgtaaaaacatggttccacaggatgcgactgccaaagtagaagcagaggatccagagccaatccgagaccaatttgacgactttttcaaagacaaacccgttaaggccaatgctgaaattgatgacaagaccctctcttttgcggtagaaggtaaggcagcccacgggtctaaaccagatgcaggggttaatgcggctacctacctggcttctttcttaaatactcaagccctagacggtggggctaagcaatttgtcaatgtgattgacacttacttgcatgaagacccatacggtgaaaaattagatattgcccaagacaatgaagtgatgggtcggttaacttctaaccctggaattttccgctttgaagaaggggacaagggtctcattaccttggacattcgttacgcgaccggtgatgatgaaagcttaaccaacttgatcaccgaagccttacttggtgaagaggtcactttgaaggtaaaagaaggtcgggtaccacactatgttccaggagatgaccccttggtgaaaaccctcctagatgtttatggtcgtcaaactggcttagaagcccacgaaaaagttatcgggggcggaacttacggccgactatttgaacgtggagttgcctttggtgccctcttcccagactccactgacaccatgcaccaggcaaatgaatttattactgtagacgacttgatggcagccatggcaatttatgcagaagctatctatgaattagtcaaataaaaaatgattcctaatcattaagaccaagttggctcaaggccgacttggtctttttgactagcttgagacaatctggctaaaccatgtaccaattttataacttgacacggcctatctaagtacaggaaccaggccagacacatttcatttcgacttggcaatcgtgctatactagaagaaaagatgaaggaggttgtcctatggatttacacttaaaagataaagtagcccttgttttagcctctagtagtggattgggcaaggcggtggcccaggccctggtccaggaaggggccaaggtggtcatagccagccggtctgaaagtaagctggcccaagcagcaagtgacttgtcaggtcagggggaaggccaggtcaagtacaaggtatttgaccaaagagactatcaaagtatcaaagacctggtcgactttacccgggagacatttggtccaattaatatcctggtagccaattcaggcggccccaaggcagggaattttgaaagcttttcggatgaggaagtccaagaagccttccaattaaccctcaattcctatatccgggttatccgcctcgtcttgcctgacttaaaagaaagccagggccggatcttgctgaattcttcctcttcgattaagcagcctatttcaggactcagcttgtccaatattttcagggctgggatcctaggcctagctaagacccttgcccaagaattggctccccatggtgtcttggtcaacttgattggccctggtcggatcgaaacagaccggatcaaagaactcaaccaaatcaatgctgaccaggctggccaggccttagacgactatgttgccaaagaccaggctgatattcccttaggtcggtacggcaagcctgaagaattcgcccagactgctgcctttttggtctcaggagccaatacctatatcacaggccaaagctcctggtcgatggtggcttggtcaaagccttgtaaaggagccaaagctggagagaaaagtgacttaccgattagcttttacaaagccttgtaaaggagccaaagctggagggaaaagtgacttaccgattagtctttacaagacccagttaaggaggacaaaaatgaccaaaaaaatatactttgctgcccccttgtttaccgagatggaaacccgctacaaccgatatgtggtcgaccttattcgagacaagtacggggaccaggtcgaaatttacctgctcaggaaaatgagaccattaacgataagacccagtttgcagattctttggcgattgcccaaggggacaatgctgagttagaagaagcagacatcttgattgccatcttagatggagtgactccggattccggcttatcggcagagattggctatttctactcctttaaccggccaatcctagccatttattccgattctcgccagggaacccacggcaaccaggccaaaattgaagccctggacgagattgccgagtctcagttttcttatatcaacttgtacaccgtgggcttggtcaaactaagagggcaaatctaccctagtgcccaagacttggttgataacttggccagctttttgggtaaataaaatcaacctattatgccatataaggcaaatccacccttgaaatgtgggggtaagatggtagactattaaatagactatcattcaaataaaaaacagaggagcgaaaaagatgactagctaggaagagggtgattccccaagaggcctagcgaaaggctttgtcgccgaagtttcaagaccctcatcaggcttgatcctgggatgcagttgaacaagttgcaaactgtcacgaaggtggagtactgtcactagcacttttttagtgctttttaacctagcctaggcagtcccggtctaggcttttttatttgaaaagaaagggaagaatagaatgaaaaacaaagcacttggtcgaagaatcctggtctccttgaccttgatggcgaccaccatcttagccaacccccttgtggttcaagcccaggatgctgcagaagctaacgctgaacgactaggaatggcgaccttactgcctccaatcctggctattatcttggcctttaccaccaaggatgtcatcttgtccctcttcattggggtctttagtggggcctatattatccaactggcctctggagttaatgtcttgatggccttggtcacctcttttactgccgtggtccaagagatgctagatgccctggctgacccctggaatgcagggattgtcctgcaagtaatggccattgggggcttgattgccctcatttctaaaacgggtggggcccaggcagtggcagagtccctggcccaatacgctaagggtccggtatctacccaattgatcacctggcttttaggcctcttagttttcttcgatgactatgccaacgccttgattgtcggtcccatcatgcggcccgtttctgataatattggaaactcaagagaaagactggcctttgtcattgatgcgacggcagcgccggttaccggtatggccctgatctctacctggatcggttacgagctcagtttaatcagtgaagcctttaatatgattggccaggaagtcaatacttacggctttttcttagaaaccttgccttatcgtttctacaatatctttatgctagcctttgtagtgattacctccattactttaagagaatttgggcctatgaaagatgcccaactccgggctagagaccaaggtcagttggtcgaagaagactcccatgttgaaactaatgatcaagtggttgaggaagggcgaaaagggtctatttggaatgccgtcctccccattgttatgctgattattttctcctttgtcggcttctacttcgacggtcgccaagccctattagcagaagggggtagtgagatagtttccatcttagaaaacaatcccctctcatttgtagccatccgggaaacctttggcgcttcggatgcttccctggtccttttccaatccgcactggctgccagcatcattgccttaattatgggggtctggcaaaaatacttctccctaagcgatggaattgaatcttggtttgacggaatgaaaagtctcatgtctacagctggtgttttgatactagcttggtccctttcatccgtgatggggagtttgggaacggcagaatttctcggtctcccaattagggacagtcatttcacctatcttgctcccatccatcatttttgccttgggttcaattatcacctttgctaccggtacttcctttgggactatggggatcctgatgccccttgccatcccactagcctacaacctagatccggggaacagccaactcttgttgaccacctcagcagccgttttggcaggggctattttaggggaccactcctcaccaatctcggacactaccattatgtcctccatgggggctgggtccaatttgatccaccacgtcagaacccaattgccttatgttctgacagtcgggcttatttcgattgtctttggttacatcccttcagccatgggggttccggtttgggtcttgattccggttgcaattgtcgtcctggttgttttggtttacttcataggggagcccattaatgtcaaagattccaataatatataccaagactaataaggaagtccattaaaagttcttgaaagaaatataaatagcagcccctagtccagtggatgttaaagctaggctaggggcattatttttcatttgctaggctaacaagtgaaggcccttgtaaagattcatttgcttaccagtgctttatcatgctatacttataactagtcaaattacttttataatcaaagtaatttgaccttatctgtcacttgtgagaggagaatcatctaaatgattaggattatgttagattcaggatcagaccaaaaccaagccttaagagaagcctacgatgttgaagtggttcccatgaccattattttgggccaggaccaatacttagatgacgaagattttagcttagaaaccctccatgcctatatgaggcagggaaagcaaccgcgaacgtctcaaattagcccccaaatggccatcgatcgttttgaagcggcagctaaggccggagacgatgtcatcttcatttccatatttaaacaattgtcagggacttaccaggttgccgtcaatgccatggaagatgtcaaggaccgctatcccaactttcaaggggcagtggttgactcccggtcagcagcaggggctgggaccattctttacttgcacggacaggaattgatcaaggctggctatgactttgaccaggtccaccagcaattagagcagtctgcccaggaactctccgtttatttagcagtggacgacttagactggttggtcaaagggggacggttgtcaaaaacggttgggaagatcggttccttgctcaaggtcaaacccttcttgagcattaacgacaaggggattaccaaggaaggggttgtccgggggagtgaccgggtctacaccaagatggcgaacactttcttggaagagattgaccgctatgaaggccaatatttgattgtctcccatgtggaccgctgggaaatggctgagaaggtcagagactacattattgaccagatcggccccgtcaacattggaatttttgaagtttcccctgttatttcctgtcacgtaggactaggcggagtaggggtctttggctacaagaaaaaacctgatcttttcgaaccagttaccttcaaatcttaaccagaccaggcttcctttctgatgggggaagcctttttattatatttttaaggagagggctttggctgtcattaaaatcagctgccttcattctcttgtcatgctataattaaacttagtttaaccctaaaatcatttgaaatactcaaatcccttatgaagttgataggagaatggaagtcatgattaagataatgttggactccgcctcagaccagagtaagtctatgagacaaacttacgactttgaaaccatccccatgccgattatggtaggtagggaggagtatatcgacgatccaaatgtgaaagtagagacaatccaccagtttatgcgggagggcaagatgcctaagacggcccagattagcccccaagtagccgagacagcctttgaaaaacaagcccaggctggccacgatgtaatttttatctccatcttcaaaggattgtcagggtctatccaagttgcccaggaggctatgaaagaagttgaagaccgctatcctgacttcaagggggcagtggtggactgccggtcagcttcaggagcaggcaccctccttttcttacacggccaagccttgatcgaggctggctatgaatttgatcaaataagggaccaattggaccgatcagcccaggacatggccgtttatgggctgctgacgatattgagtggttggcaaaggggggccgggtccccaagacgatcgtcaaagtcggttccatgctccaagtcagaccgctattgaccttagatgataaaggctttatcaaagattcattggtccggggcaaagaccgggtttacatgaagatggcagacaagctcatcgaccatatttctccctaccaaggccagtacctacttatctcccatgttgggcggagggagatggctgagaaggtgagagattacattatgagtaaatatggtccggttaatattggtatttttgaagcttcaccggttatttcatgtcatattggtttaggaggtcttggagtttttgcttacaagactaaacctgaattatttgaaccggtgacgttcaactcttaagccagtctagatcctctttgctggcaagagtgtcgtattttaactttaattcttttgtgtacaagctagggtcgtgttatactgaaccataatttaagataatagtcacatccgaaaatttagaggagaagagatgaaatgattaaaattatgttagactctgcttcagaccagggtccggccttaagagagacttataaacttgttaacatcccgatgtcgattacggtaggtaaaaaggaatttatcgatgataatgacaacaactttaaagtagaaaccctccaccaatatatgcgtgagggtaaacaaccccatacggctcaaattagcccccaagtagccatggaaacctttgaggcggctgccaaagcaggcgatgatgttatcttcatttccatttccatccggctttctagttccattcaagttgccaaaaatgccatggaggaggtcaaagaccgctatcctaactttaagggagctgtagtggactgccggtcagcttctggagcagggacgcttctttttctacatgggcaagccctagttgaagctggttacaactttgaccaagtggaagctcagctgcaaaaatccgcccaagagatagcagtcttcgtggcagttgacgacatagactggctgataaaaggcggtcgggtgtctaaaacggtcgggagagttgggtctctgctccgggtcaagcccctcataagtatagatgatactggatttattcgcgacagtatcgtcagaggccgagaccgagtctataccaagatggttgaccgattgattgaccatatagcttcaccttatgaaggccaatatatcgtcgtctcccatgtggggcggccagatatggctgaaagagttaaaaactatattattgaccaatttggaccggttaatatcgggatttttgctgcctctcctgttattgccagccatattggcttgggtggcatggctgtttttggttacgagaaaaaaccagaattatttgaaccggtggctttcaaatcttaaataagaccaggtttccgattgctgtcggaagccttttttgatcggattaggcctctgcatttatttttagctttcatatgtgataaaattaatatagttgatataaataataaggattagaggtgacaaaatgcacgaatgcattgaatgagtcaatggatttattattatttattgtaaaccctgataaagggcaaacagttataaatttagcctataaaaaagggattcgggccggcactatcttgcttggactcggtacagtccgcaactccattttaaagaaactcggtttggacaatagccacaaggaaattgtccttttattagcccctagccacaaggccaaagaaaccatggattacattagcgaagtcaaaaacttgaacaagaaaaattttggcattgcgtttcgaacttccatttccaatgtcttaggtgttagcaagcacttagtcgattttggccaagttccagaagaagaccaactagaaggagaagaggaaatcatgtaccaagcaattgtgacaattgtcgaccaaggcgatggccgggacgttatgcgggtagccgaagacaagggtgctaatggcggaacctttatcaaggctcggggtgctggttcagctgaagccaagcgggtctttaacatcgaaatagaacctgagaaagaaatcttactcattattgctaagaaggaaaatactccagatattactcaagctatcagtgaccatttgaatattgacgaaagaaatgctggtatacttttcaccgtagatcttagcgaaacacggggtctattcggctgaacaatcagcacttgttctgagaaaaactaatcccaattgaaaggggccatgtatttgtgaacatactaacagaaaagtttaaagaagtgctgacctcagttttacccatttacattattgtccttttaatttattttttcttgattgatatcccttcttccatcctactatcgttcacgatcggaaccattgtgattatcataggtttgaccactttcttaacaggggtagaagtcgggattagtccaattggggagtatatgggccgggggatagccaagtctaataaactaagcattttaattatctttggctttatccttggttttttgatctcagcttctgagccctctgttttagtcttaggccagcagctagaaaccatctcggatggattaatttcaagctttgccatggtaatggttatctctgtcggactcggggttatgattgtcctcggtttgatgcggattgtctataagtggtccttgcgtgccgtcttaaccacttcttatcttatcatctttggtttaaccttgatcagttccaatgaaatcattgctattgcttttgacgcatccggggcaacgacgggagaagttacggttccttttatcttatccctagctgctggtgtggccgtcttggaaagtaactccaagtcttcctctgccgattctttcggcctagttggggtcgcgtccgtcggggccatcattgccgtattgatcttcaacctcctcactccaagtggcggcgacctttccggctccttggacattggggtagcccaagagattaatatcgtagaacaatatgcctccaccttgatcgaagaagccattgatgtcttctttactctcctacctatcgttgtccttttttggattttccaaaagctacgactcaatatccccaagtctgaacttaaccggatttggaaggggactgtttatgtatacatcggacttgtcctctttatgaccggggtttacgcaggctttatggatatggggattattgttggctacaccttaggttctgaggatatgctagtggaacttagcctggttggggctgtcattggactagtaaccatcttggcagaaccagctgttaacgttttgacccaccagattgaagatgtcaccgctaacgctatccaccggaaaccggtcctagtggccttgtgcatcggagtctcttttgccatcttcctagccattatccggatgcttgtgcctggattagaattgtggcatatcctcctccccggctacatccttgtcttgatcctgcaatttttcgttcccaatgtctttgtagggatgtcttttgacgcaggtggtgtggcaactggtccattaaccgcaacctttatcctagcctttgtccaaggggcggcagaagccattcctcaagcaacggtaatcggcgaaggattcgggatgattgcccttgtcgcccttatgccgattttgaccctccaaattttaggctttatctactcaatccggagtaaggactaagctagaaaaatcgtggttgtggtaaccttaaaattgggtgcacacctaaactcgtagtatggtaaaagcccggactcattctttacccaatagcatgtgttaaaaggttggcttggccagcctttttgactagttaatacttgtaatatacaatatttcaatcctattactataaaatcggctctatccaagccaggcttggatgtggtatactaggtgacgatgacatatttggagggaagttcatgttctggattctactgattctgattgttgcattagccatctatttttattaccaaaaccgattcattcaagtcaataaatacaaaatgaccattgccaacttacccagccagttgcggggaaagaaaattgtccaactatctgatatccacttcagggataatatgaacaatggctatgtcaaatccatcttaaaaaaagtggctagccaagaccctgacttgatcgtgctcacaggagataccctccatgctagcttggaatttctggaagagaccccggtcgaagattttcttctcgacttaaatgacttagccccaacttacttggttactggtaaccacgatatttctaatcccaactttgatgagttttcagccttggtttctcaaaccggctgtgaacttttaattgatgatgcagtctatgctcattttaaagatagccagcctcaagaagacttggttttaatgggctttgccgagcgggggggtatggagaatgtcccagatcctatcttgaataacatcgacctagaagcggggatggaggctaaaccaaaaattcttttggcccaccacccagaattttttgaagcatacctggccgatcctaacaaggcaccagacctgacatttgctgggcacagtcacgggggccaggtcatcctaccttacctgggcggattatttaacaagtcacaaggctttttcccccactatgattacgggatatttattggccaagaccagccaactaagcgaatgatcgtcaaccggggtttgggtaactctggctttcctatgcggtttaacaaccggtgcgagattataacccttacccttaactaaagaggggaggaaaaggggcctgtctcgagaggctatacccgaggcaggtcaaattcctttataaattttaaattgaccctttacatttttttaaaataagatacaatggttgatgtagtcattttttggttccttagctcagtcgggagagcgcttgctcgacatgcaagaggtcactggttcgagcccagtaggaaccatcaactaaagcatgctagcttaaggttagtgtgctttttctatgcttttttggtgatcgatttgagcctctattcttattgaaaagataaaagaggaaggcatgtatctgactacacctgttgtatataacaaagttaatttttatggagaaacgcttgttatacaagacttatgttggttttctttaacaacactagttatacgaaaatatttgagctttttctcatataacacttggtatttgagaatttttagcagaatttctcaaactacatatgttatttgagaattcttaactatttttctcgaacaacatatgttattcgagaactaactctatttcaacaaaaaactgttatcgatgcacccaagcctttctttttttataatagccagtaataaacatccacattccttatccaaaagccagggtaggtgtagactgaagcaaaaataaaggaatggcatcattcttctcttgagaaaaatcttatgttagactattactacaaaaaatgtatacgttaacataaataaaagtaacaagacaattaaaccggattcatatgagttttcccagacaaagcttctggttataattgatttggaataggaggattgtcatgaaagacaagttcaaacccttgtttgaatcagtgaaattagacagtggaagtgtattagccaaccgttttgtcatggcgcctatggtagtagagggatccacataccagggaacgcctggaccagaagatttggcttacttcaaaagacggaataaaacggctggtcttctgattacaggagctgctgcagttggtcccttaggcaatgctttcggtaacggcttatcgatcttggatgacagtcaaatacccgcctggaaagacttggctcagacaatgaaggatagtggcaacaaggctgtcctgcaaattttccacccaggtcggcaggccaagtattcctataccgaccagggcaaggttgtaggcccatctgatgctgactttgactttttagattacccggtaaccggcttaagtagccaggaagttcaagactatgtccactactttggccaggctgctagacgggctgtggaagctggctttgatggggtcgaaatccacggggccaaccactacttgatccaccagttcttttccaagtcttccaatttccgccaagatgattggggtggcagcctggaaaaaagagcccactttgcactagctgttgcccaagaagtcaaggaccaggtgaaaaaagctggcaagtctgactttatcattggctaccgctttagcccagaagaagtccacgatgaccaagtcggctatgacctggaagagagtctttacttggtggacaaactggctgacttgggactggactacatccacacctcccagttcggtcccttatctttcaagaaaaaagcagaagtcggcaagtacagtggccaagtcatcaacagtgtagttaaagaaaagctggctggtcgagccctactggtaggggctggtgacattagtgaccccgacaaagccctagaagctagccaatacctagaccttctagccatgggggccagtgctatcctcaagcctgacctggttcaaaccatcaaggctggccgagaccaagactaccagttagaagtgaaagaagaggacttagctgaccttgccttgccggaccgtttctaccggatggcaggatcacttggcgtcaaccaatcattttcagaccaacttgttgctcgtctaaaagaaaaaccggaccatctcaagtaattttgtcggcaaaagagtgcaaataaaccaggctcgctagctaggtttagaaaggataaaagaaaatatgaaaataaaagctaattgggaagggaagaaaaggatcaaggtggaaaacgaagccggccaccaagtccatatggatgatgaagtagacaaggggggcgaccggtctgctatgaccccggctgaactcttaaccgcttctttagcgggctgtatgggaatttccatcatgacttccttgctcaactacaaggagcctgtagaagagttaagcttagacttggattttgtcaaaagtgacaagccgccaaaccgggtagaagagattaaaatgatcatcaatattaagaccgaaattcccaaagaccgaattgatcggatcgttaagctgtctcatgagaaatactgcaccgtctccaatacccttaaggctgaaacgtcttatgagatcaactacctataagttatagcaaaaggagccgtggggcttcccccccacggctccaatgctgggaaataagctcttcttttggatgatcgcctaaaaagtgacctggcaaactcggtttcaagcatgtagagaaagaaaaaagagtcgtgaccacgacccttttctcaaaaagtagtatgagttagaagttgtcagcccaagttccatttctgaaaacgggaaccttgctaccatcttccttgattccgtcgatatccattttgtcagacccaatcataaagtccacgtgggtggttgaccggttcaagccagcttcttttaattctgcttctgacatttcggtcccgccttctaggttaaaggcataagccgaaccaagtgccaggtggttggaggcattctcgtcaaagagggtgctaaagaaaataaggccagattgggaaataggggactcgtgaggcacgagagctacttcaccgagactggaggacccttcatctaattccagaagtttttcgatcacttcttggccacgttcagctgttaccttggtgacatgaccattttcaaagtggaattccatgccgtcaatgatagacccggcataactgaggggcttggttgatttgacgactccgtcaatccgcttagcatcaggggcggtaaagacttcctcggttggcatattagccatgaagcgctcaccccgagcattaaagctgccggcaccttcccagtggtggcctttaggtagacctactgttaggtcagtacccggtgctttataatggagggcggtgaaattggcttcattgagttcatccgccttgctctctagggtcttgtctttttcctcccagctagcaactgggtcatcgtcatagaggtggatcgccttaaagatggcatcccaaagagcatcaacttgttcttcctggctgtctaggtcagggaagactttggctgcccaggctggactagctgcagcggctacggtccaggagactttattggcctgggtggcatcccgcatgggtctcatcgcttgacctagagctttttgggtggctgcaattttttcgccatctaaaccagccaagttatctgggtcatcatcaacgatgctgatccggctagctccatggtccaataggtagttcattttggcaatccggtattcgggaacctcggtcaaggtttctttggattcatggctgaacttcagccgggctaaggtgtcgtctgcccagtcaatcaagacttcacgagcccctttttggtaggctgtcttggcgatagcccgggccaattgggcgttttctacagaggcattgattgctactgtgtgaccctcttggacattgaccccggttttgacaaagagttcagcatacttgtcgattaaatgatcaaaattgtttagaaccatttcgtattcccccatttttatgataaaataaatatttctccatggatatcatgttagcatagtcctaaaagaatctcaaatatgaagaaagtgttacaggcatgttaaaaaattagtacaatgttaatacatatctaccattggtgctttaattagtgatatagtggaagagaattgaataatacaaaaggagatattttttatggcacgtagaaaaaccataatgaaagaacacatcctcaaggctgccgagaacttactgaaaagagaagggattgatagcctgacagcccgaaacgtcgccaatgagctcgattgttccacccaacccatctacaatgaatttaaaaatatggagcagttaaagtcggaagtcattgccaatacagaagaattttttaccaataaattaagtgcaactgctattgaaaatgctagcttgcaaagtgtttgtgaagactatataaagtttgctgaggatgaatcgcccctctttcggtccatgtacatgtacaaaaatgcttattcaggcgacctccacgataatatgggcaaaaccatgattgacttgattgataagtatacgggagcttcctgtgataccttgcagttgtggaaaaatctctaccctctcttgtttggtctcgcttccctgatagccctaggtaaagttcaaacaaaagatattaacctctcaaattatgttagtgcttacatcaaaaccgctgtcgatttagccaaataaggagcttgcacttaagcaaagatataaagcttgtggcctttaaatagtggtgaggccgacacttagctcaaaaaacaaatagaaaagctgtggcccgtccagttgggacgggccacaattttttgcttagctgacctttagggaaggttaggataggggttttagttttgggcttggtcaataagggcttgagccatggcgtttaagtcgttaatggcttcttgaccagggatgaggttgtacttgactggttggaatccctggttggcaccggcctgggccaattgctggtcaaaatcatctaccgacttgcagtatttttcgtagaagtcatctcctgagccaaaggtgccaaagactttgccagacaagtcgacttcttccaattcttcataaaagtcaacaatttcctcaggcaaattgccatctgggccataggtataggtgccgacaatgacgatatcatagtcctggaagtcctccgggtcagcaaagctagcttcaactacttccacgtcaactcctgcttcttcaaaggcttcttctaaaatttcagccccttcttcagtattaccggtcaaactagcgtatactatcattgcttttaccatgatttattaactccttttttaatcaatcattcttattatagcaaagatgacccactgaataaattcacccgtctggatttttattattctaaaattactagtctgataaaactactggcccgcctttttagctattgtgaaagataatgtttcttctgacgaaaaatttgttataatatgaaaggtaaaataatagagaggaaggaaagcatgataacacgaaaatcaccgcgggaaatcgaccagatggacaagtcaggtgatgtcttggcggaaattcacgaaggcttgcgtgattttattaaaccaggtgtaactggagaagaaatcaaccagtttgccatggacattatggaaaaacatggggcaactgccgaacaaatcggctatcaaggctatgaatatgccacctgtgttagtatcaacgacgaaatctgccatggattcccaagaaagaccaaactgaaagaaggcgatttggtcaaggtagatatggtagtcaacctggatggggccttgtcggactcctgctgggcttatgtagtcggccagggcagtgaccaggtcaaccacctgatggaagtaacccgaaaggctctctacaagggaattgaacaagcccaagttggaaaccggatcggtgacattggggcggctatccaagaatacgttgaatccgaagacctaactgtggtccgggaatttgtgggtcacggcattggccctacccttcacgaagagccaagcgtgcctcactttggccaggctggcaagggcaaacgcttgaaagaaggcatggtgatcaccatcgagcccatggtgaataccggaacctggcagtcaagcctggatgacaatggctggacagcccgaaccaaagatggtggcctgtcttgtcagtatgaacacaccctagccattaccaagaatggtccaagaattttaaccaaacaagaaggccagtaagggcgaaaacaaactcaataatgaactcaatccttccctaatcattaggggaggatggtttttctaaggaggccagaatggtagataaaattttaaaaaagttgaaatttgactgggtaacagaggtcattgatatggcctcagaagggaagatctggcagtattcaacctttatcacctattatatattttttaccctttttcccttgtttgtgggggttatcaatgccttccagttccacaacattgatatcactattatccaccgcctcctccacaatgtcttaccttctgttttgagcgaacgcttggtcaatgacgtcaatgtgatttatgaaaattcccactttgggatctacctgatcgctttgatctcatcgatctggaccattagctggattaccaactctatcgtcatgggcctcaaccaagcctatggggtgggctaccgtaggaatattttggtcctgcgtttgcttgccttttcctttaccattggtctggcagtttggtttggactcgtttcggtctttctccagcaagttcccttaaataatatccaggtcattatcattttattattggtaaccttttttacttcctggtttattttctctaccgttcccaatgccaagcaaaaatactaccaaaccctgcctggggccgtcattgtcactttgtctttcttggtggcagggatcatttatgtccttctaatgggcctcttgccgtctgactccatcctctttaccatgctgggggcttttatgatcatctttgccattacccaaaagcttgccttctttatcttggtgggaggcctagccaaccgctactttattgaaagaagagaaggtcaggtgacagctaaaaatgaagacagttctttcctcaagcttttgatccggttaaatattttacaagaaaagtaaaagccaactttatgggaaaagctttcatttccatagagttggctctgtctttgttttaatttttgtagaaagagtcaagctagaccagactttagtatcatcacatactttttgctttaactcttgtggaagtagtcaaagtaagcccagggttcccgttggctagcttgctggggttggctggtgaaagtccgcttgtctcctttggtgacatgggggaaggtcaggcttgaagcatagagggctaagtcttggccgggttggctaaagtaactgccatatttttggtccccccataatgggcagccccggctagcaaactggacccggatttgatgggaccggccagtttggagttggacttggattaggcttaggtcctttttgacttctagaacttggtaggtcaaactagcaaacttggcttttggggtgccttcttctaccacaaagacctggttattagcctggtccttgtagaggtagtcttcaaattggcctgtttgaggcaaatggctaccctgaaggactgctaagtaggtccggtccatatttcccttccggatggtttctgacaagcgactagctgctttagaagtcttggcaaagaccatcaggcccccagttggccggtcaagccggtggaccaagcccaaataaacccggccaggcttgtcgtacttaacccgtatatattccttgacttcatttaagaggtctgggtcaccagaggcatcttcctggcagggcatattaaggggtttatcaaccacgatcaggtggttatcctcatagataagctttatatcttggaagtctgccatccttatccctcttcagcctggtagccattgggattttgtttttgccaacgccagctatccttgaccatccgacttaagtcatattctgcctgccagcttaaaccttccttggccttgtcagctgaagcataggaagtagccacgtcacccggtctccggtcaacgaactggtaggggacttggacttggttggtctccgtaaagctttggaccaggtctaaaactgaataacctttcccggtccccaagttatagatttcaaggtggtcttttgtgtccaagacttcttctagtgcattgaggtggcctcgggctaggtctactacatggatgtagtcccggactcccgttccgtcaggggtgtcgtagtccttgccataaatggagagctggtccaacttgccaatagctacctgggagatatagggcatgatgttagatgggacgtcagttgggtcttctccaatcaggcctgattcatgggctccgatggggttgaagtagcgcaagatgaccccagaccagttttggtcagcttggacttggtcttgtaagatttcctcgataaagagcttggtccgcccataagggttaatcgtggacaagggcatatcctcagtcagtgggggctcattgtctaagccataaacagtggcactggaggagaagaccatctttttacagttaaattggttcataacctccattaaaatggcagtgccgcccacattgttttgatagtacttgaccggttgggctacggattcgcccaccgccttataaccggctaggtggatgaccgcttcaattgtttcttttttaaagaggttggtcaaagcttgcttatcattgatatccagttggtagaagcgaaaaggcttgccagtaatttggtctaaccgcttcaagacttgggggctggaattggagaagttatcgactgctactacatcgtaatcctgatttaaaagttcaaccaaggtgtgtgagcctatatagccagctccacccgtaactagaattgacataaatgttccctccgttaaatagtatcacttctattctaccacaactgaaccagtgtggcggaagggtgaaaaaattaagactttttaaaaagccgaacttaatttaaatttctatgttaaaatggatgggcatattaatgaatcagagataggaatttagcatatgtataacatgtatgaagtgattatttattgcattatggccattttaatggcttttgccttaacgccccttgtcaggcgcttggccttcaagctaggggcagtggactatcccaaccaaagacgggtgaatacccagcccatgccttccttgggtggcctggcgatttatgtcacctttttctttatcatttttttcctccaacccatccagctcagacaatccctgcccctttttatcgcagcgaccatcgtggtagcaactggtttgattgatgatattaaagaaatttctcccaaggccaagttgcttggtatcgtgatcgcagccctctttattgtcttgatcaatgacttaacggtggcccggtttaccttgccccttattggacctgttaacctgccattttggttgggtctcccggctaccttgctgtgggttgtggccatcaccaatgccattaacctggtggacggcttggacggtttggccagtggcgtgtctgccatagccttgacgaccatgggcttgatcagtttcttcttcctcggtgctaacagctacttggcgaccattttaatctatagcctggttgggtccatcctaggctttttaccttggaattttaacccggctcggatttatttaggggataccggggccttatttttaggctttatgatttcggtcttttccctgtatagcttaaagaatgttaccctggtcagtttaatcatccccatcgtcatcttaggaatgccaattacagatacggtttatgctatgctaaggcggaaattaaataaaaaaccaatttcctctgcggataaaaaccacatgcaccaccgactgatgtctttgggcttgactcaccgacaaaccgtcttgtttatctatgctattgcggctatcttttccatcacagccctcttgtacccaatctcatcctatctcggtaatatcttaattacccttttactcttacttggggtggagatctttgtggaaatgatcggcctagtcggggaagatcgacggcccttagtgaaaaccattcgtgcttttgcccggaagattaatagaaaggggaaaaaaaaccatgactaatgtacagcaagccttggtttccattattatgccagcccataatgcggaaggctttatcagccagtccatccagtcagtcctcaaccaaacatacgacaattgggaattggtcatcaccgatgatgcttcaaccgaccagactgttccggtcatccaatcctttgccgaccccagaataaaattgcttcaattgcaggaaaataagggagcagctattgctcgcaataccgccattgaacaagcaagaggcgactacctggcctttttggacagcgacgacttttggcacaaggataaattgacccgacagattgcctttatggaaagcgaagacatcctattttcatcaacggagtatggcaatgttgattcagacggcaatttgctttctgtcacagccaaccacgaccagttagactatgagggtttgctcaagtactgccccggcaattcaactgtgatctacaatgccaaggtcttaggcaagttttatatcccagatatcaaaaaacgcaacgactttgtcatgtggctccgggtgatcaaaaaagccaagaccctctatggcctgaaagaaaccttaacctactaccgggtacgggatgacagtttatctaaaaacaagcctgccttggttaaataccagtggcgggtctaccggcaaatcgaacacctcagcctagctaaatcagcctacctacttggccacaaggtcttaacggttaaatttggtttgaataagaagtgacaacgggagagcatttggaggtttaagatatggatgtaaccttgagtgaaatcaagcggtttttaaaagaccatctaaaatttatcaccattacaacaattattttcaccttggtcctggctggtttactgacccttgtagatggcctaagttccagtgaaagcagtgaattggaaaatgaactagagtatgatgaggttttggaggctgattcggcttatttccagttttatgctgaatttgaagatggggacttatttactaatggtaaattggttgaagattacttaaaattgaacactattaatgagaatgtatataaagaaacaaatatcaatatcccggaaattgaggatcgaatcaacgaagactatcccgaattcgataatgagtttacagtagttgaagttactcgtaattctgattcgaatatctttacaattactgttaatttaggaaatgaaagtaataatttaactttagcagaatattattatgatctcttgatggaagggaatgtggattttttagagaataaaagactattttccttggttgaacctcaattagtaagtgaagtttttgaggaagaggtactaatggaaacaggtttacaaataaccccggtaaatgttatcaaaaatacctttatcgccttaattgtttccctagtcttagcagctggcctggccttgttgaaggctatttttggtcaaaagctagactatagttttgcctacaatgtagaagatgaggtcgaatttttggtttataacccagctaagtcgaatagtcagcttttgcattcctttatcagccaacccaaggacgctaaaaaaattgttcttctggaaggctatgggaatcaggaagaaaataatttgtctgtcgaccaagttctccaagagatcgatactgacaaggtcttagtgcttgattccttgacttctttggaccaggaaggagaatttgcagaaattgacctaatcgttcaaccctaccgaactgaccgaacttggtaccaagaccaagttgaattgatgggcttgtacaatatcaaaatgaaagtagttcaaattaatggctaacgaagtggtggaagtatgatttggttattccatattagtatgatcacaatcttgctcattgtggctaagttatttaaaaaggataatttttttatctactcttcttttatctatgccatttttatttttgggcaaaggtggatgacgggaacagattttcctttttatttgagatattatttgactgattacgataatgtagaacctggttactattttattcaaaaaatattgaccgaaggcaatttatactttggtattctcatatttattgtctttgctataacggtctacaacatttatcgtttcattagcaagattaataaacatacggttttaatgatttttttatttttaatctcagaaatattttttgcccagatgtcgcaaattcgtcaatttttggctgtgagtttctacatgaatagttactattatgcctttcaaaaacaatatttaagatcgggcttaggaattattgcaggactgttatttcatgattcaattatatttcttgttccatttctattaatccatttgaacctagataagattaaaactatttatctacttatattgagtggggttttacctttaattgatttaactttgttacttaaattacctatttttaaccgatattctcactatgtaggtggacagtttgatgtagacttgtcaatctttcactattttagattttatatcttgcttgctattgttctatattttttatggactatagaccggttagggaaaggacgggttgagcagatgatcttgaatggcttagtctttaactttttgctttacggcatgagtttccagtttgccctttttttaagagtcagcatgtatttcaaaatttttgaacttgttttcctagcatattactttaaacaaacaaagtttgtatcaaatataatagctgtagcaactgtttcttttctttttgttgggatttatagtgggttgggtatagtagacccttatagtatttctgactaccaatttagaccaataaggatttttgaaaatcgtagtcatgatcgcttaagagaagaaatagatgaatttattaataattaaaaataaggagattttatggatttagaagttctactatctacgatgaacaaaaataatttagattttttaaacaatatcaacttatcatcaaattgcgttatagtgaatcaaaataaagataattatagtgtaaaagatgtgcaatatggcagctgtaatttaaggttagttaatagtaaagatatagggctaagtagaagccgaaatctagctataaaaaattcccgcgcagacatttgtgtgatagctgacgatgatattgtttataagaagaattatgtaaatattattaaacaggcttacatggataatccgcatgctgatattattgctttccaagtttctcgtattaatagtaaagaccgaaagaaatcttttcgaaaaagaaaaagttgggatggctatttaactagcatgaaaatttcgtctgttgagattacttttaaacgaaaatcaattgttaataatggaatatcttttaatacagattttggcgctggtacgtattttagtcatggagaagaaaatatatttttatacgactgcttagatcatggacttaagattctttatttacctattgaggtgggtcaggttgatgtttctaattcaagctggtttcaaggttataatgcctcttatttccataccttaggggctaaattttataatatgtctcaaattacctatccagtactaatttttcaatttgctattcgaaagtataaactttataaagaggaacttagctttttccaagctatttatttaatgaaacaaggtgttgatatctataaaaagaaaatgggaatcaggtagatttattgttaatagtatatatgatccaattctgtagtattattcacaataaaagtgttagaattgtttggcactaaatacagtatttaatataagatatgtataattaaaaccatttagttagttactagaaatatacgaaagaaggtgtaatactctttaattagtctcatatagaatttgaattagtaatttaaccaatatttctaaagttattagtgacttattatatagcaaacataacgtaatatttgaatagtaacagatgtataaagtcaatagttgtaaatgaaagatatatgatttacatctgtggatagtgttaagtaatttgtgcctctacatgttattttaaagcacattttgtgtgtttggtttattactaattacatttgataaataatactaataaagagaaaatgttatggataaaacatacgaattaaataaggaaaagaaaagtgaattaaaaaattgtatacatattgctaactggtatattcactattgtgaagctcctatttatacatctattagtgatagaagaagttgtgcaatattaggagaatttttccatatagaaaaacctgaattaactgaacaagatattacaaatgaaataataaagctaaagaactttgaagatgttataattttcagcaaatatttgttgggtcggtttgttatattttattttgattatgatcattcagtgaaaattctcccagatgccactacaactattccagtttattatacaaataaagctggtaaagaatatatctcttcagatagtcacttgataaaaaataaatttgattttcaattttctgaaactagtattaacattaaagaagcagctgataatcaacatcctttaccatataacataactatgtttgaggaaataaaggttcttatcccaaatcattattatgattcaaataccggagaaatgcatagatattttcctttggacgatgtaagccatatttcactgctcaatgctactgaaaaaacaatatatgtcattagaaatgtactctcttttatattaaaaagaaaaaaattatcactacctttaactgctggagttgatagtagaactgtactatcatttctaaaaaattatataaacgatatacctacttttactttttatagtacaaacgatacaggtgatttagagatagctaaggatatttctcataaaatgaatttttttcacaaagggcttaaacgaaaaaaacttacagatgatgaaataagttattttagtgataagctagatggaaaccacaaagtaggcgtattaaatgatgccttaacacttaagaaatcagcttttaaagatcgcagttttttaactggtgatattattccccttgctaaaagtaattttgggaaaaatttaccagaaaaatgggctactgcaagttatttggttacaaaaacccataattattctagagaaaacaaagaatacgtcaaaaagtggttgaaagacgtaaaagaataccattatttgtctatatatgatttatttttctgggagtatagatttggaagatggtttcctaatagtgtaattaattatgatatttggacagatcctttttacctttttaattgccgatacttgattgaattatggttaagtattcctagaaaccaaagaactaaatactctcttcatgaagaaataataaaaactaattggcccgaattgctaaaaataccgatcaatccacatgaaaaatatttgaataaatttttttcaaatcaatacctttattatttaggatcttttggaaaatattacttacaaggtttaaaaagaaaataaggttagtaattaattgagaaataagaatataataagttgataagttacagatatatttaagaataaagtgccgagattattatgctgaaaaatattaataatactagaaattcttaaacgatatttcttttatttacgaaattcagtatactagacctagcttatgctttagaatttaggtgaaaactttggaaaatgaacgtattccttctcgagctgcccagggttcgccctactaccggcgtaggagagggtgcctgccaggctgtggttgtggtggctgcctcttcttcgttttaattgcctttttcctagctcttatagtggggctatttgcttaccgggatattcggtcaacttctgatgccatccacgaagaagtggaagaccaagaagtgatgcgggatgatgccgttgacctcggcgatggcgatcctttttcagtcctattgatggggatcgacacaggcgaagaaggccgggtcgaccaaggccggtctgacaccatgatggtggtaacggttaatcctcacacccaacaatccactatcgtgtctattccacgagatacttataccgaaatagcaggtagggggactatggataaaatcaaccatgcctatgcctttggtgggacctccatggcggttaacaccgtgcaaaagctatttgacattccgattgactactatgtttccatcaatatggaaggacttgaacaaatagttgatgcccttgatgggataacccttgtgcctgattcaactttccaacaaagtggctacagctttactcaaggccaggaaacccagctagatgggggagcagccctagcctactctaggatgcggaagcaggacccagaaggggattacggccggcaaaagcggcaaagacaagtggtcatggctattgtggatgagctggcttctattgaatccatcttgaactaccgaagcgtgctttcggttttagaccaaaatatggcaactaatatggcctttgacgaaatggtaactatttttaccaattatcgggatgcttccggtaatacccgtcaagaacaattgtcaggcgaagggacaaggatagatggtgtctactacgatattgtcagtgatgccgaaatcaaccgggttcagaccctcttgaaagaagaccttgaaattaactaaaagcagaagataaaggatgatagacatgtcaaaaatcgcagttgcaggaatgggttatgtgggtttggccaatgctgtcttactagcccaaaacaatgaagttgtcgctttagatattgtaaaagagaaagtcgacctgattaatgacagaaagtctcctattgtcgactctgatatctcagactacttaaccaataaagacttggaccttgtagcgactactgatccaaaagtagcctacggtcagtcaccagactatgtggtgattgctgccccaaccaactacgatgaaaaaagccactactttgatacttcagctgtggaagacgttatcgaaacggttctaaaatatgctccagaagccgttatgatagttaagtcaaccatccccgtcggctacactgaagatgtcaaggccaagtatgagaccgataatatcatcttttctccagaatttttacgggaaggtaaggctttatatgacaacctttatcctagccgaattataatgggggaagaaagtgaccgggcccgccactttgctagcttgctggctgaaggagccttaaaagaagacatcccacaattgtttgtcggtgcaactgaggccgaagccgtcaaactcttctccaatacctacctagccctccgtgtggcctactttaatgagttggactcttacgctgaagttcgtggcctagatactaaggccattattgacggggtcggcttagatccaaggatcggtgaccactacaacaacccttcctttggttacgggggctactgcctacccaaggatactaagcaactcttggccaactatgaagatgttcccaacaatattatccaagctatagtggatgccaaccggactcggaaagactttattgccgaccagatcttagataaagatcctcaagtggttgggatttaccgcttgaccatgaagtcagggtcagataacttccgtcaatcagccatccaaggggttatgaaacggatcaaggctaaaggggtagaagtggtcgtttacgaaccaaccttagatgaagacaagttctttaactctagggtcctaaaagacttggatgccttcaaagaagaggcggacgtcatcattgccaaccgtatggcagatgacctagaagacgttaaagacaaggtatacacccgggacctttacaaaaataattaagaatcctttacaaaaggccttctggcatatcaagagggccttttttagcttataatagatacttggttttatcatgaatgaacaaggactgagctgaagatatgagacagagaaattacaatatcgacgtcttaaaagggctagccattctttcagtaatcttactccatacccttccatggtcaatccggttccgggtgggggctccctaccatatttggcaggcggtcccaatttttatggtactagtaggttataattttgccaagtcggcccaggtcaagggaagggagagcttaggacaactctaccaaggcaagctgatttggagacgcttggttaagattatccagccctttgtcctagttatgcttgttcggttagtcttagagctagttctctatcaaagacttgaccttgccaattttttgaccgacctcttcttaggggatattgactttgggggttattacatcccgattatggtccaatctatctttctaaaccctatactgtactggttaatccggcaaaatactaagcaaaataccctttggcttttggtcttgtccttagccttggactggggcttgaaccttgccggattgtggggcagcctttaccggattttgattgtccgctaccttttcgccattgtcttaggcatgtggctagccttagctgaggaaagggttcagttaaaatggctacttgctctagccggattgagcctggtctatattaccggagtctattattttgacctaaccactccattggaaacatactggcaggcccagcacggcccagcttatttttggaccttactcctagtctttttagggctacatgtctattatgctaaaccagaccactggctaggtcgtccccttatttggcttggccaaacgtcttatcctatctttttaagccaaatgctttacttctggttaatgagtcagctaaccagtccaagtaatctaggattgtctctcatctttaatttaattatctgtgtttttttaggtaaaattctagaaaaatttacacaaacttaagtattatggtatagaatacgtaaagcaaattaaacttgaatggagattgacaaagcaatgccatcattaaaaaaccaggccgtaaacgggacgaaatggactacagcccggaccatactaaccgctattaccggcccaattttactaattgttaaaacccgcaacctatcccctgaggaattcggtgtcatggctattatcaatatttttattgggattattagtgttttagaaaattttggttttaatacggccattatccgtaaagatgaagtaaccaaggatgaacggtcttctttgtttatcttacaaataatgatttctatctttttggcctcattattggttatttcttcaccattgattgctagcttatttaatatgccacctttaaacgacttgctacctgttttaagtttgtctattctttttaacagtccggttattttattcactgccttcttagagaaagaatttcagtttaaagcagtttcaatcatccacatgggtcgagaacttgttttgctaatttcgaccaccattttgttccaggtattgagtcaaccactctatgctgtagttattggacaaatcttagccgttggttttatggctattggaataacaattgccacttttagtttcgaccttttacacttgcgtctccattttaagcttgacgatatcaagccttatttcaaatttgggattgttgttggctttcaaaaagttgtcatacaattgacccacaatgttgatgaaatgattattggctttttcttaccagaatcagtactaggctattaccattttgctaaaaaccttttaaataaatttcgacaactattaactgtatctttttctaaggtgcttttaccagtactatctaaagtaaaatatgaaaaagaacgtttgataagagggtataaccaaatttcttcttatatagctacggttaccttgcctatttttacaggtattgctttaacaactaattcttttatccccatcttttttgacgaagaatggttagcttcttctaattttttcataatattagctattagctatattccctatattattagtgattcaataggcactgatcttttgtattcaatcaacaaaccgaaattagccctagccattgactttgtcacaaacttagcatatattcttcttctgctcttggtatcttggctacagattggtctataccctattgtaattttatatggtttatatatgctggttaaatccattgtcacccaacactatgtttaccagcagtttaaccggtcatttttggaatatctaaaactctttaccggtttgattgctagtaccttgattatggtggccgttgtgctcctagcccaaaatgctgtattgaacgacatgagtgtttatgtagactttattgtcagcgtgattttaggagtcatctcctatgtcgccagcgtttacctcttcgagaaaaaaaccttccacgaccttgttggcatggtagccaaccgtgtttaatttgattaggctccttgtcctaaatgatcagtttaggggaggggcctttttgtagccatggcttttgtgatctagatcattaggctaaagctaatgctttttaagctaacttttgatagaatatggaagattagaaaatagaggtgacgtaatggattatcggattaagaaaactttgtggatacttttggcagccttgatcatctttccggtggttattctgctaacaggggacttgtcgtcaatcggcaaggggcttctccacggccttctcaccctggtctttttggtgatggtcttttcagtttggtcctcccttagacccattacttggaaaaaagttggcctgaccatcttgtgggctgtggtcttttattttggccttcccattgctatccaattggtatcgggctttccaatcgttttaaaagggattgcccacttattagtcattatcctctttatagctgccttcctttggatttggtatgacgaaagaaaggccccgcattataggggatagggtctgtcgactgattcaactgaaaaaactgcagtaaagctagctcaaagctggactttactgcagttttttagtatttgagccttatctattcttggtcaggcttggttaaaaaaagcttggttgtctactaggtcttggagctcttccaataattctttcataatctggtcccaactttgcttgagagcaaaggcccgggcatttttagcgtaatactggcggacggaagcattgttcattaaaaataagagggcgtctaaaaaggcttccacctctccaggagggcagaggatgccattgtgggcttgcttgactaagtctttaactcctccagccttggccccgataaccggcaggccacttgctagggcttctaaaacaacattaccaaaggtttcagtggcagaagggaagaaaaagatatctcctgcctggtataagagggacaagttatccccttgctggaagccaagtaagttgatggggaggtcaaattctctggcctgccttttaatttcttgtcgcatgggaccgtcgcccacgatattgacttgcagcttgtagaggaggtggggcgggatttctttgagggtatcaatcaagacatccaaggacttttccgtagctaagcgacccacatataaaatggtaagcttgtttttttctagcttgaatttggcctgggcttcatgcttggcccagtctttgaccttggctggcttaaaatggtggtggtccacccctctgggccaaatcttgacattgggatagccttgttcttttagctggtcagccgtaacggatgatggcgcaaaaacagcctggcaagcttggtggaaccagttgaggtaaaagtttaagatccctttagcccaatccaggttataagactttaaatattggtcaaaattggtgtggtaggaagccacaaaggggacaccatacttgacggcgtatcgccggcccaagacacccaaattgaagggggtagccacatggataaggtctggcttgaaacggtccagttttgccttgatttcaagggggttggcaatggcggcttctaagtcagggtacaggaaaaaggggtaactcttgtagcggataatatggtcgctggaatctttcttttccttgctttctggggcaaagaccttgacctggtggccctggttctttaagtagtcagcccatctttttagggtaagggcaaccccattcacatctggcacataggtatcagtaaatagtgcaagtttcacaatcatcacctcttttggtcaaacggtaggccttcatttccatcctaactttctattattaaaattagtcaaagttaatgtataaattatgataaatttgtaaacttaatgttaacttctaaagcgaagactgatttttgacctggcaaattttctaaaacttgcatgagatttggcacggtaaagagcggtttggcttgaaaaaaggtctaaatacaagaaatctcccttttcgcctcatttatggctgaaagggacttttgaatgagaaggcctggtctagtaatcttagccttaccaaggccttggaatttaataaaggatgtgaagcaatggacgaaagagattttctcctgacctttcaatcaataatatggggtgttttagctagcttgcggatccactctactgctagccactatgatgactgctaccagctaggcttaatcaagctctttgcagcttatgaggactttcccggtgattttgaaagcgaggagggcctctaccagtttgggggctatgcctaccaaaaaataaaatgggcggttattgatgaatgccgtaaaatcaagcggtcggctgaccaagaaaccgacctccctatgcggtatgaagagttaaaccttttccagacggatgggatcgaagtaggttgtttggctcggcttgagatggcagacttcattcaaagtttaacggaccaggaaaggtgttacctggctctttacttggaatatgagaatgtgaccaaggtagcccaggcaatggggcggagccggaaaaccgtctaccaaatcaggaagcgtattgcaggcaagtatttggcttatgaccaagtcatgtcggacacaaacagggaggttaggaaatgaaatccattatgattgaccccggccatggggggagcgattcaggtgcagtgggctttggtcgcttagaaaaggactggaccttagccatcagtttataccagtacaagcgtttggaggaactaggggcaagggttgccttgagccgggcaggagacgaaactttgccttcttatagccgggtagcccggattaaggaccaatatgactattgtatttccaaccactggaatgcctttaacggccaggccagaggggtggaaaccattcattcttaccgggccaatcctctttttgcccaaaagttagctgaccaaattgtcaaagatagtggcctacctttgcgccgggttttctcccgtaagaccgccaaccaaaagagtgactattactttatgcaccggctaaccgggaccaccaaaacggttatcattgagtatggttttatcgaccacaaactggatgccagtttttacgctcaggaagatcatttttaccgggtggctgaaggggtggtcaaggtggtttgcgcccaaattggtatttcttatcaaccagcaggaggtcggggagttttggctgagaaaggccaacaaggaccagccaggacttcttctgggcaagcgggaccgagttcaactaagtctagcctgtcaaggttaggtaagatttccacaaggcaagctgggccggaattaaagaagtctggtgcccaagctaaagaactagcaggcaagcgactgagaagtatccaccggggccggctccgcttttataataaggccagttggaagaaccaagatgtcttcggttacttaacttatggccaaggctttcctagggttttacaaaaagttcaagtcggcttggccagtcaataccaggtggaaaattccaagggccagcgtttttatgttactgccagtcctaagtatgttgagttgatctaagagagaagttccgagataatctaatgtagcgaaaagaaagaggatgcaaagatggcctttgcatcctcttttgtatgggtttggtgtttcctgtatgttttccaagattcgaaccaaattagtcctattttagcttttgacttgaattaattagtctaagttggatctagtttgttgcggtcctaagttcgaaacaattaaattatctccacttttcccaacttaaaacaggtccaaatccatttgcatggggcccagaccatcaaattcaaggcccaggtatttttgcagggacttggcattcttggcggcatggccccctgaattgttattaaaaaccactaaaacggaatcagcttgctgggctaatttctgactagtttggccaatttcagcaatctcttggtcagaatagttccacaaggtccggacatcccgccagtactcgtctgactcacccgaccagccttcataattcctcccatgcaggcggtaaatagcagactgctggttggtaacttggggaacaaaaggcacactattagacgatgtttgtggttggtccactaccacgtttataaagttttggtcagttaagaattccaacgttttgtcagccatcccctcttcaaaccaggaaggatggcggaattcgatggcaaccggcaactggcccatctcttggcggacaaagcggaggtagttgacattagccttgctgcagtcgaagttgggcgggaattggaagagaaaactatgaattttcccccgggctatcatagggttaaaggtctccttgaaagttttaaagaggtcttccaaggagtcaaaatcttccttgtaatcagcgtgcaaggtcatagctttgtaagccttggggaaaaaacgaaagcggtcaggcgttttttcgatccaggacaggatatttttctccggtgggatggcataaaaactggtatccatctccacagccgggaagtgtttggcatagtcttctaatttttgcttttgcgtttcggtcaacaagtcgtggtcgctccaaccggtcaaagcaatctcaatcatcaaaccacctcattcaataaaacattctaccacatttgatcttgaaggactgggccaaaaattgttaaagcttacacttttgcctttgaaagccctagagaaaaaatgttaaggcttatactttttttgaaaaccttggcgaaaaatgttaaggcttacatttatgtcttttgaaagacctagcgaaaattgtttaggaatatattattgcttttgaaagacctggcgagaattgttaaggcttacactttcaaaaaagaacaggtacaatggggtaaaaggaggaaggattatgaaaaaaatcgtggtcgttggcagtatttcaaccgattttgtggcccagacatcccgttttcctgaagttggcgaaacggtagaaggacaggccttttcaactcacttcgggggcaagggggccaaccaagccgtggcagccgccaaactcttcccccatgtccagatgattggggcagtcggcgatgatccttttgccaaaaacttaatcgctaacttggagaaccatcaaattgacgctagacaggtgatccaagtttcccagcaagggtctggagcggccctcattgtcttggcaaagggggacaaccaaatcgtctatactcctggagctaataatgcggtcacagccgacctggtcgaccaggcaaaagaggacattttatccgctagcttggtcttggtccaaaatgaaatcccaaaagagtcagtccattacttgcttgacctgtgccaggacaagcaagtacccgttttgttgaacccagctccagcccgagacctttcggaagacgatattgacaagattgcttatttaacccctaacgaaaatgaatttgaccacatttttaagggtcaagaccaggctaaagttttagccaaataccccaacaagttgatcatcaccttggggtccaatggggttaaatttcacaacggccaggaagttatccatgtcccgtccatcgaaccctatcaagtcaaagacactaccggagctggtgacacctttaatggagccttggcagtcgctatggtccatgacctccccctcgaccaggctatccactttgctaacctggccgcttccttgtcaattgaaaaaatcggcgcccaaaccgggtccccaaatgtggcggaagtcaaagcaagaggtggcattgaaatagattggttggcaggctaggctgggaaattttgagtttggcacaaataaatcatcttgaccccagatttttctggagataacaacttgtaatgaggaccgggctagcaggctatagttttttcaaagttcgtctgatcggatgatgagcctggcaatttttttaaaagcaaaaataaaaagggcccttttttgcgtatataatagtaacggtgaaaaagaaggtgaaatttggaaatgagaactattgccgaaaaactgatgatggacgggaagctaaactttattcgtcagcctagccaagaactccaggcagaagtggtgaaaactttgcgaacaaaggccttcacttcccatgcccagcgattggtcaagggctttgatggcgaaaggcaatttgatgagacctattcaacttacgcccaggactcctgggactacctaacggattttcattttgaattgggaaccttgacccagctagacgctattttaattacgcccggccatatccatgtttacgagattaaaaattatccggcatattgccaggtccaaaatgatattttttcctacaatggccaaccgcttgccagcaatcctttcaaccaggtaagggccattaagtctcggtttaacagcctgctgtctttgatcagctaccaaggccaggcatcttaccacctggtcatgattaataaggactgctattttaaggaccgggaccaatttagtgatgtcttgatgcgcaacgaactcaagcttcatttccaaagcctacagcgagctccttataaaaagaacccgccaaacttgctggaaaaaattaagcagtttgaaaccgacaacccttaccagaagaattatgcttttgattaccgagacctgcccccggggatcctgtgctacaagtgcgggtctttagatacttacccgtcctacaagcaaatcaagtgccgagactgtggtcatgcaagcagtaaaactaaggccttgcagaacttaatcggcgaactctctatcttggaccagaacaccccaattcggacccatgatatccatcagtatagtggtggggtgttgagtcggaaatatattacgaagaatactaaaaattatttaagtagaaaacagttgttcactcaatattatatcccgtcaaccaagttgtttaattttccacccttatataaaatatttcacaaaatatataacaatttataattgaagttcatccgtaataggattgtgatgataattagcgaggatgttaattattaatctctagctacggatgaacttttttattcaataataacaatactataccgaaggcgacaatggggggccattcggtactttaagagttgaaaggcgacaatgggctagccattcggtactttcggacttgaaaaacgacaatggaccagccattcggtactttcgggcttgaaaggcgacaatgggctggccattcggtactttcgggcttgaaaggcgacaatgggctagccattcggtactttcggacttgaaaggcgacaatatgggctagccataaggactttaaaagttgtaagccgattatcgaccagaaagaaactcttttcccagcccaaagtaggatatcagcctgcaagaggctatcttacatctaagcctcggcacgactacaatttagcatttttatttgccggctgttttcggtataatgtagggtagcgattgttgaaaggaggatttgatgttagaaaaattgaaaaaccatatcaagtcagagtttgatcttgaattcaaagatgaaagcttattgttagaggcttttacccattcatcctatgcgaatgatcaccatcaggcccggcacaaaaacttggaacggttggagtttctaggtgatgcggtggtggaattatgtacctcggcttatttatatgataagtttccggaactacctgaaggccagttgacccggattcgggcagcttctgttcgggctgaaagtttggcccaactggctcgggagtgcgacctgcctcagtttatcctgctcggcaagggtgaggaaatgatgcagggtcgggagcgaccagcccttttgtgtgacgttttcgaagcttttacgggggctattttccaagaccagggttacgaacaggcccgccagttcttaagccaggtgcttttcccaaaaattgaccatgatgatttttctcatgggatggatttcaaaacggctctgcaagagttgatgcaggaaaacggcgaagtcaagattgattacgatgtggtggataccaaggggccggaccacaaccggactttttatgtggaagtgaaaattgaaggcgattcttatggggtcggccaagggaattctaagaaaagggcccagcagcaggctgctaaaaaagccttggagcagttgagccaaaagcaggctagtgactagacctaggtgactgaaccggaggaaaaatgagtataagcttgaccaagcttatctgtccttgtgatgggtaagcttctctatgttagagggcttggtcaaggaaaaaaaccagtccattaccgaaaagttaaatccaagcaaagcaagtcattatcaagcaccatcaaaggggaagtatcgtttgcagttaaaaagactgaaaatcaaggggttcaagtcgtttgcggacccaactacaattgaatttgaccagggggtgacagctgttgtcggtcctaatgggtcaggcaagtccaatgttatcgaagccattcgctgggtgatgggagagcagtcggccaaaagccttcgtggtgggcggatggacgacattattttttcgggaactgaccaacgcaagcctatgaatattgcccaggtcaccctaactttggacaactccactggcttcctccccattgactaccaggaagttagcattagcaggcgactcaaccgcaatggccagtctgactaccagattaaccagcaagactgccggctcaaagatattgtggacctctttttggactcgggcttgggtaaggaatctttttccattatttctcaaggcgaagtggagtctatttttaaggccaagccggaagatcggcgcgctatctttgaagaggcagcgggagtttttaaatacaaggttcaaaaaaaagaagctggacgtaagttagaagatacccagggcaatcttgaccgggtggaagacatcttgcatgagttaaaaagccaggtcgatcctttgaaagaccaggctgaccaagctcagaaatacaaggacctccaggcccagctcaaaaaaactgatgtcggcttatcggtcatgcaaatcaaggcctatgccaaggacctggaccaggccaaaaaagaccagcagatcctcaagcaaaaaatccaaagtctcagtcagtcccttgaagaagaccgccagacccaagaccagttaaagggtgaccaagaccagctgagccagaaacgtgaccaggtttacaatgaaattgtcggtttaatccaagctattgaaggtaaagaaagtgacctggcccttcaagcagaaagggctaagcacaagcaagattatgtccaggaaaaaaccaaatcgattgaggccaaccaggctgacctggaggaagtcaagcggaagttggaagcaaaagaccaggaccgggtgcaagtagaagagtcaatcgaccagctgacccaggaccttaaggccaagcgagaccggttggcacttttacaagaagatagcgatgaccgcttggaagacttacgggccgactacatcgacctcatgcagtccaaggcctccctcaacaatgaagaccagtccttaaagcaagacttgaccaagtttggcatgcaaaatgcccgtcaggaaaagacccaagctgaccttcaggccaagttggaatcgagccaggctgacttaaacgaaaaagaaaaagagctagaccaggtcagtcaagaactaaatgatctactagaccgattccagcaaatcgactcagactgcaagcaattcaaggaccgctatcaaggagcagaagaccggctccgtcacttaaaacaggattatgaccgggccaaggctcaatacactagtttagcccagatgcaaaaatcctactccggctattacagtggggtcaaaaaagttatgcaaaaccaaggaaggcttcagggcattatcgggacagtggcagacttaattaccatccctaaccaatacctcacagccattgacaccagcctggggtcttccagccagtttatcgtggtggaagatgaggcatctggtcgggcagccattgactacctcaaacaaaacaaggctggccgggccaccttcttgcctctcaccaccattaaggggcggcaagtccaagccaagctcctgcaagaggcccaaacccagcccggctatattggcttggcatcggacctggtgacctatgaccagaagctgacccaaattgtccataacctactggggaccaccctcctggcccaggacttaaaatctgccaaccagattgccaaggccatccactaccgccaccgggtggttagtttggacgggaacatgatgaacgctggcgggtcgatgactgggggaggaaaccggtcccagcagtccccaatttttagccaaaaagaccaaatggaccacttgcaaggcaagctaaaatcccttcaacccaagattcacgaccaggaaaaacaactccaggacttgaaagctcaaaatgaccgcagtcaagatgacctagaagagatccggtcacaaggggaagccaagcgctaccgggaaaacaatttgaaaaatgcgattgcccacctgactgactccatcaagtccctccaagaccaggtcaaggccggtcaatttgaccaggaggaaagggaccgggaagcccaagaagccaaggaccgtttgcaagccattagtcaggagaaggagcaagttttagcccagttggaggccatcaaccaggaaatggaggacttaaacactgccaaggcagactccagcaagcaagaagaccaaatccttgctgaaatcgaccgtttgtctaacgacctaggacaaaaacgggaaaacctagcttccatcaaggccaacttagaagggctgaaagaccaagaagaccgcttcctaacagtgattgacgacctaaaagcagatatcaagtcctttcaggaagaagaagtctcccaagcctctagggaaagcttggcagcggaattgaaagacttaaaggccgaccaccaggctaaaaaagaccaggaagcccagctaaaagaaagggaggctgacctggcagaccaggttcaaaacttagctgaccaaatcaaggaccagcaagaccaaatccaggacttgacccaggccaagaataaaaatgaagttagccagtccagacttgaagttaacctggaccaccagctcaactacctggttgaagagtatggggtgagttttgaagaagctagccaaaaaccagacctagatatggatgctggccaagccaaagaccaggtcaagtccttgaaaactgccatcagcaacttaggcccggtcaacctcaacgctattgaagaataccagcaggtggcccagcgttatgacttccttgcccagcaacaagccgacctcatagaggccaaaagcgaactccaccagaccatgaaagagatggaccaggaagtgaaaagccggtttaaggccatgttcgaccaaattaaggaccgctttgcccaagtcttcccccagcttttcggtgggggccgggctgaactccgcttgacggacccggacgaccttttaaacaccggggtagacattatcgcccagcctccaggcaagagcctgtcctcccttagcctcctgtctggtggagagagggcattgacagctatttctctactttttgccattatccaggttagccctgtcccattttgtattttggacgaagcagaagctgccctggacgagtctaatgtgaaccgctttggtcgttacctccaggaatttgaaacggacacccaatttattgtgatcacccaccggcgggggaccatggaggaggcggaccgcttatatgggatcaccatgcaggaaaaaggagtttccaaactgatctctgtccgcctttctgatgtagaccaagatggtgactgggaagaagcaaggtagccggaagcgtcaagatagaaggaagagtcgagaaagctccaggagtcaagctatcaggaagattgagatagctgcaggatcaacccatctggaaaagtcaggatacttaaaatcaagattgctagaggaggcagccatgaaagtaaagccagatattcgcttaattgccatcgatttagacgggaccctcttagaccaggaccggaagatttcccaggaaaacaaggcggccattgccgcagctaaagaccagggagtcctaccggttttaacaactggccggccctatcctggtatggttggctacttagaagagtgccagttaatggaagagggggactactgtgtcacttataacggggccatggtccagaaaacagctagccaggaaattctcagaaaacatacctttactaaggaagaaatccagtccattgctgaccttttagctgacttggacctgccaatgagtgcgatcgggatggataccatctatgaaagcaagccgcctcaaggcaagcctagttcttaccgaaacatgcaacccctcctaccagtagtcgaaaatgttgcggttaaggacttagaagatatcgctaaaattgtcagtgctagaccccaggcagaaattgaacgggccttggctcagatacctcaagcctaccaggaccactttaccattgtcagaagccggcccaacctggttgagatcttagctaaaggagtggacaaggcgagtgggttgaatatgctggcccaggaactccagataaaacccagccagatgctggcgattggggacatgggcaatgatgctgctatgctaacctatgccggaattggggtggccatggggaatgcaccggaagccattcaaacgatcagtgactacgtgaccaagtctaaccaggaccacggggtagcccatgccatccaaaaatttgtgttaaaatgaaagcaagcttcagcagacactgactggggaggagagatttcatgggattatttgataaaataaaaaaagtatttaccggagagtcaaaggaaaaagaccaggaaaagcagggtgaggaagctggtggacaggccagtcagacccaaaagacaaaccaaggtcaaaaagttagtgccagtccaagttcagaccaagggcaggcggaaactcttgatccagacctggacacttctaacctgcagccgagccaggaaaaacaccaggctgatatagcgggccagcctagtcaaaaacaagtcaaaaaagcaggtcaaggtcaagctgaccaaactcaatcaagtcaagctaagccaagccaggatagagaccaaacagccggcgaccaagctagccagaccggtgctggccaggagagtcagacgagccaagcccaaactaccagcgaccaagcccaatctaacaagcccaatccagaccagggtcaagcccaggcaagtgacagacaggaccgaagcagtcagcccgaccaaggacaggcagacccagaagccagccagcctagtcgccgtgacccggaagaagtggcccgactggaagctcaaaaatacacggaaggcttgtccaagtcacgccggtcctttaccagacggctgaacgagctttttgccaacttccgctatgaagacgaagaattctttgaagaattggaagacctcctgattgaatcagacgtgggctttgaagccaccatgtttatctcagaagttatgcgacatgaagccaaggtagagaacatccggaccatgaaggatgccgaacgggtcttggtcaaaaccatggtggacctttatggggataccaaccctgactatattgagtttaacgacaatcccgatggcctgaccgtgatcttgtttgtcggggtcaacggggtcggcaagaccacgaccattgccaagatggcccaccagtaccaagaacaaggcaaaaaagtgatcttagctgccggagacaccttccgggcaggggccattgaacagctccatgtctggggagaccggattggcgccccagtcgtctccacccaaaaaggaggcgacccggctgctgtcgtttacgatgggattgcccaggccaaagaccagggagcagacgtccttttaattgatacggcgggacggttgcaaaacaagaaaaacctgatgaacgaactagagaagatgaaacgggtcatctccaaagaaatcccggatgctccacatgaaaccctcctggtcctagacgctactaccggtcaaaatgccttgagccaggccaagatctttaaggaaaccactgatgtgacagggatcgtcttaaccaagatggacgggacagccaagggtgggattgtcctagccattgggaaagagttaggcattccggttaaatttgtcggtttaggggagaccatggacgacctccacgcctttgataccgaaaaattcgccatcggtctctttagagacttaattgagcagacggcttaaagtgggtcaaacaaagcaaggaggttaagtatgcccatcgaagataggattgaaatcaacagcttgtttgacttctatggccccttactgaccgaaaaacagcaagactatctcaggctctactaccaacaagactattccctgggggagattgcggatgacttagcggtcagccggcaagctgtctatgataacattaaacggtcagagaaaatcttgaaagactatgagcagaccttacacctggtagctgacttccaagcaagagagcaagaacttgacaagctagccagctacgttaaagaacactacggacaggaccagcaattacaagaatttattgacaagatcagtttagagaggtgacagataaatggcctttgaaggtttaagtggccgattacaagatgccttttccggcttaagaaaaaaaggaaaaattaccgaatcagacgtcaaagatgccatgcgggaggtccggttagccctactggaagccgacgttaactacaaggttgttcgggaattcgttaagaccgtccgcgaaaaagccattggggaagaagtactggataacgtagatggcggccaaatggttgttaaaattgtcaacgacgaattgaccgacctgatgggtggcgaccgccaagatatcataaccaatgatcaaggcattaccgtctacatgatgaccggtctccaaggggctgggaaaaccaccacagctgggaagttagccaactatctccgcaagcacaagaacatgaagcccatgatggtggccggggacgtttaccgaccggcggctattgaccaattggagactattgggaaagaattgaatatcccggtcttcagcatgggagaccaagtgtcacccgttgaaattgccgaacaagggatccaagcagccaaagaccaaaaccgtaatgtggttatcattgatacggctgggcgtttgcatgttgaccaggccttaatggatgaattggccaatatcaagtcggctgtcgacccagaagaaatcttcctggtagtggatgccatgactgggcaggatgccgtcaatgtggctgatgcctttaacgaccaactggatatctccagtgttatcctcaccaagctagacggggatacccggggtggggctgccctgtccatcagtaagattaccaacaagcctattaagtttaccggtaccggcgaaaaactagatgccctagaccccttctaccctgaccggatggccaaccgaatcttagggatgggggacatcctgaccctggtcgaaaaagcccagcaggatatggacgaaaaaagggcccgagaactggccgacaagatggctgatcaaacctatgactttaacgacttcatcgagcagatggaccagatgcggaacatgggacccatggaagacattattaaaatgattccgggaatgaaccagttgccaggcttggatgacttccaggtggatgacaaggacttggaccgaatgaaggccattgtccagtctatgaccatggaagaaagacggaacccagacatgctgtcgcaaaacagacggcggcggattgcagcaggctctggtcgccccctagccgacgtccacaagctcatcaagcaatttaagcaatctcgtgaactcatgggtaaaatgtctaaaggtaaaatgcctaaaggactggacaagctcatgggcgggtccggtggcaaaaaaggtggcatgctcaagcggatggccagtaaaatccctggcatgggcgggagccaaatgcccgacatgtcccaactagaagaaatggccggacagcaaggcagtcaaaaaccgaaacggaagaagaaaaagaaagtccggagaaaaagataatatagaagaaagacaattgctagctgaagaaattggcaattgtctttctattttcacaagtaaattagtagaatatgaactgattaagaggtttaaaattatgattgtttcaaaatcaaaaacaaacaaaataggccaaaatagtaccatgaatgtgattaaatacttttgttttatttttataaaatatactctattacttgatttgaccaaatcattgtattattatattaactagttacatagcactagtatgcatgtaatgtaaggcttaatcgaatgtttgcaccgtaacatttttgtaataaaagttgcacaaatgtaaacaggtcattaagcatggaaattgccgtgtactaattaaatttataaaggagattttaatatggtaggaaaaaataattacaaaacgcgtgctgaaaaagctgccaataaaaaacaccgacacttaaaaaattaagtgtcggtgtcgcctctgttgcagttggagcaaccttattcttaggtaatggccaagccgtttcagcagaagagcaacctgatgaaactgaggcactcgaccaaggtgacgaaaccgaatcatcggatgaagctgaagactcagaagaagctgacctagaagctgctaaagaaaccgccaaagctgaattacaagcagctggagcaaccagtcccaaactagcagaatacattgacttcgctgactcagtagaagaagtggaacgccttaaaaatgactttcttgacgttcgtcgccaacaattagaacaagaccaagcagcagaagagcaacctgatgaaactgagactccagaccaaggtgatgaaactgaagcaccggatgaagctgaagactcagaagaagctgatctagaagctgctaaagaaaccgccaaagctgaattacaagcagctggagcaaccagtccaaaattggcagaatacattgacttcgctgactcagtcgaagaagtggaacgccttaaaaatgacttcttagacgttcgccgtcaacaagttgaacaagaccaagaagttgaaggcgaagcgcccgaagatgaaggtcaaacgcctagtgaacctggtcaagaaaaaccagaggacggttcagaagatgaagaagctcaagctcttcaagccgcaaaagaatcagcaaaagctgaattgcaagcagctggagcaaccagtccaaaactagcggaatacattgactctgctgactcagtagaagaagtggaccgacttaaaaatgacttcttagaagttcgccgtcaacaagttgaacaaaatcaagctgcagacgaagacgtcgacaacggtagcgacgatactgaaaagcctggggaagatgacgaaggtgaaactgctgaagaagtagtttacaccctatactattatactcaaaacactaaagggaaaaacggtgccactaccgtaaaagctacaagtgtagaagaagcattggaatacttccaaaacttcgctagtgaaaatggcctaggtgacctagactggttttacaacgaagaaagcaagtctttcactgctagagaaaaagtagaagctgatgacgattctgacactgaagcacctgacgaatcagatactccaactgaccctgatgattcttcagaccaagatggagacgatgattcaacagatactgacgatccagatgatactgatgaagtagggagccaagaatctgtttacacattagtttacctaactccaaacactaatggtaaaaacggtgcaactactgtaaaagcatcaagtgctgaacaagctgaaaaatactttaaaaactttgtaaatgaaaatggcttaggtgaccttgaatggtcttacgatgaagacacaaaaaccttcactgcaatagaaaaatcaaatgacacgcctgatacagatgaagacctagttgaagaaaacaacgaaactggcttctcaactaaagaggcagcggaagcagcggcagaagaagctttagaaactgataaagttaacaactcatactctgtagcacaaggtgcggatggccgttggtactacgtattatcaccaaatctgccagaagaatccggtgacgatacacaagaacctgatgacgacgttgaagaaaacaacgaaactggcttctcaactaaagaggcagcggaagcagcggcagaagaagttttagaaactgataaagttaacaactcatactctgtagcacaaggtgcggatggccgttggtactacgtattatcaccaaatctgccagaagaatctgatgacaacgactcagaagagcaacgcttagcgatcctccaagcctcaaaagatgcattcaatgaatatcttaaaactagcgaagacgaagctgcgttgattaataatgctgagacagtcggagaagtcgttgacgcagccaacactatcattgatggccgcattgcagccaacgctcaggaagagcaagctcgtgcagctgcattccaagcaataaaagcggcactcaatgaaaaccttaatgctagcgaagacgaagctgcgttgatcaataatgctcagtcagtcggagaagtcgttgacgcagccaacactatcattgatggccgcattgcagccaacgctcaggaagagcaagctcgtgcagctgcattccaagcaataaaagcggcactcaatgaaaaccttaatgctagcgaagacgaagctgcgttgatcaataatgctcagtcagtcggagaagtcgttgacgcagccaacactatcattgatggccgcattgcagccaacgctcaggaagagcaagctcgtgcagctgcattccaagcaataaaagcggcactcaatgaaaaccttgatgctagcgaagacgaagctgcgttgatcaataatgctcagtcagtcggagaagtcgttgacgcagccaacactatcattgatggccgcattgcagccaacgctcaggaagaacaacgcttagcgatcctccaagcttcaaaagatgcattcaatgaatatcttaaaactagtgaagacgaagctgcgttagtaaacgaagctgactcactaaaagacattgttgacgcagccaacactatcattgacggccgcattgcagccaacgctcaggaagagcaagctcgtgcagctgcattccaagcaataaaagcggcactcaatgaaaaccttaatgctagcgaagacgaagctgcgttgatcaataatgctcagtcagtcggagaagtcgttgacgcagccaacactatcattgatggccgcattgcagccaacgctcaggaagaacaacgcttagcgatcctccaagcttcaaaagatgcattcaatgaatatcttaaaactagtgaagacgaagctgcgttagtaaacgaagctgactcactaaaagacattgttgacgcagccaacactatcattgacggccgcattgcagccaacgctcaggaagagcaagctcgtgcagctgcattccaagcaataaaagcggcactcaatgaaaaccttgatgctagcgaagacgaagctgcgttgatcaataatgctcagtcagtcggagaagtcgttgacgcagccaacactatcattgatggccgcattgcagccaacgctcaggaagaacaacgcttagcgatcctccaagcttcaaaagatgcattcaatgaatatcttaaaactagtgaagacgaagctgcgttagtaaacgaagctgactcactaaaagacattgttgacgcagccaacactatcattgacggccgcattgcagccaacgctcaggaagagcaagctcgtgcagctgatttccaagctaaaaaagagaccactattactgaattacaagaaattcttaacgatgtcctttccgatgaggaaaaatctctgattgttgatgcttacacagtggaagaagtagaagcggcgaaagacactattattgaaggccgagaagaagtctacacccttatatatactatagacggggaagaagactacagaaacactaaagccgttcaccctggtgaagctcgagaagcattccttgactttatccgccaagaaaacttagatgttgacgttatcgtctatgataaagacacaaaatccttccgagcatttggcggagaacaaccatactacttccattactcaaaagacggggagctctacattgatgggacaaaggctcagcacccaggtgaagccttagagatcatccgagattacattgaagagacagatcttgaagttaccaacctcttctacgatgaacgcacaaacacatttcatgctgtgctagaagataattctggtgttaaaacggatgaaacagtctacgagtccctacctgaagaattgagttgggatgaaatatcagatgaagctgatgaactagcagagcaatatctaccgctattcaaagcacaagatagtgcacttgaagcgttaaaatcattgggtatcacttctgaaagattgtttgacgaaattcgagaagcaacttcagttgaagaagttgaacagttagcgacaagcattctagaaactcgtaagcaacaacttttgcaaaacccagaagcggttaaagctttatcaatacaacgtttggaagctgacggtgctcttactgaaaaccaaagagcgttgctgactgacgctgaaacacatgaagaaattgcacaagcttcagaagtagtgacagtacaacgtgaggttatttcaaatctaaacgaaggattggctgaagacctatcttcagaagaggaagatcttattacaaacactagtactgtaaaagaagttcacacagcagctgagactattttaaatgctcgcgaacaaaaagcagctgaactctaagcggcgaaagaagaagcaattaaggaattggaagctgacggtgaaaccaccgatcaagataaagaaagaattgagcaagcaagtactagcgaagaagttcaagaaataaaagaagacatcttggatagccgcaaaaatgtctgggaacgtattggtgacttctttagaaacttattcaaatagttactaggcttgggacttattaactaacagtttgcagtagttaataatgcctcctttccctcaagggacaacctatcatggaataggttgcccctttttttaggttctacaacatttgacgttggtgagggattcaccagcgtcattttttatttgatgttttcgcccttttttcttttatatatagaaaaacaagtgaattccccttacaatatagtcaccacaacttaagaaaggagaaattcacttgcctcatcaacatgatattcgaaatttaattcagattcaagatgaaaacatttcttttcaggagcccatgaccgaagaaagggaagtcaaaggacaagcggccttgattcttcatgcctctttaacctacacaccacactgctgtgctaaatgtggcgtcgttaaccaaaactatacgatcatcaaaaatggcacgcaggaatccatgattaccctcccctttcaccccttcaaacccttttatttatgtctccgtaagcaacgcttttattgccgttcctgtgggaaaacatttatggcttcgacccatttggttaacttcaattgctttattgccaatccgctgaaagctggggtagcctttgaagcaagtcgggcggtttcatataaagatattgccgaacgtttaaatatttcttggtcgtccgttgcccgttttgcccgtctggcggcgaaagaaagacggaagggccccaaaagcctgcctgcccacctatcctttgatgaatttaaatataagaaggggaaaatggcctttgactatattgatgccgctaccggtcagatcttaggcattgtttccggtcggacccaatataaaatcaaccaacactttatcagccagtacagtctaaaggatcggcaacaggtccaaacggtcaccattgacatgaatgccggctatgtttcttgtattcgtgaactcttccctcaagccaaaatcattattgatcgcttccatttagttcaattgatcaatcggtcgtttaaccaaacccggattcaatacatgaaccaactccaatccaactcttcggatcaaaagaaatagaggcgacttaaagcgtattggaagctcttcttaaaaaaagaatctgacttatcctatacgtcctatcacttttaccgtctctttggtcaacgaaccgaagcgggtattcttcaggaaatgttggcctatgatccgtccttaaaacggcattaccggctttatcaagacttgatacaggccatccaagaccaagacatggccaagctagaagatcgattagccgtcaaccaagaaggcttatccaactacatgaaacgcagcctcaaaaccctggccaaacacctcccctttattgagaacaccttccactatccgtataccaacggtaaaattgaaggtacccataataaaatcaaagtcttaaaccgcattgcatatggcttccgaaatcttggcaattacctcgaccgaatttgcctttactttagctcccaacccattcaataaaaaaagataaagtccatataattgtgtaaaaagaaaaagtcataatgacctttttgagctacaatgtagttatagaaaaccaaaaaacacattgaaaggaagatcattatgactcaactcaatcttacactagacgccaataaattaacagacgcaattttaaattgtgatctggatcaagtgatgaaatccaccttcgtgacggtcttaaatgcttatatggagtccgagcgcgaccaatatatgaaaagcaagcggtacgagcgagatgaagatcgctgtgattaccgcaatgggtatgacgagcgagatttcaccacgaaaatcggcaccctcaagctcaacgtgcccagaacgcgatcaggcgacttccatacccaattatttgaactcaatcagcggatggatcaaggcctattggctaccatctttgagatgtacgtcaatggcatctccacccgcaaaatgacgaaagtcgtcgaatccctttgtggtcaaaaggtctccaaatcgtttgtctccgatgtcaataaacacctggacaaggatgtctttaactttcaaaagcggtccctcacccatactaatttccggtatatctatgtcgatgccatgtatataaaggtccgagaggataaccgggtggtgtccaaagccctttacatcgcccaaggagtcaatgatgagaataggcgagaaatcatcgggtttaaagtggctgggcaagagtcaacggaaagttggcggtcgttcttcctcgatttaaaagccagaggcattgatacgccgaaaatggtgatttcagatgcccatgcaggcttacggaaagctattcaagaatgttttgtcaacaccacttggcaacgctgtacctttcacttattaagcaatatcaccgatgccttgccgaaaaccacggaccgagtcatccgagatcgtttccaagcggttttattttccagaacccagcaggaagctcgtgaacggaaacaagcattggaggcggaattcgaagaccaagcgaagctggctaaagccttgagcctattggatgagggctttgaagatgccattcagtatcagatcgagccttctccttaccacatgtctttaagaacaaccaattccattgaacgagtcaaccgtgaaattcgacgtcgagaaagagtggtggggattttccccaatatcaaatccgcggaacggctagccggctcggtcttattaaacctgcaggagaattgggaagctcagaactatcgatttttacgataggttgaactttttaaaccccttttaaaacctgcctccctctggaaaaggggctttttccctcggtcacttggcgtaatctaacacaccgctggctcgcttcaagagaagcccactctttccgctcgccaaacggtgtgtttagccgatcacgccgaccgacggaaaaagaaaaagccccgtcgtataacatctgttactatattgtagaatttacacatagatttggacttgacttaaaaaaaggggcaactttaagaagttgccccaaaaaagaacagtgactatattataccaccaacgctaaaaaatgaagagccgttttttacttatcaatagtcctggtaaaatctagaaagataggacgacttttttattgcagactttttagactaagatttgaggaaaacattcaataataaaaaatggttgattgaatgattatgttaaatttaattttcatgcatcattaaatacttgatttattttttctgttatattattggtattagttacgtggcagtagtgtgctggtaacgaagaactcgatcataagttataatatgtcaatattatgacaaatgtaacatctttgtgacttatgtattgagtaaatttgtttaagtatactaatacaaaggagttttagaatggtaggaaaaaataactataaaacacgtaccgaaaaagctgctaacaaaaagcaacgcttttcacttaaaaaattaagtgttggagttgcttctgttgcagtcggtactactctatttttgagtaatacagatgctgtttcagcagaagaaaatccggataggaatattgaacaattgcaagcagctctagagactgaaaaagaattcgcaattgccgaagtacaagcggcaggttttaccgatcaaaaatatgtagattggattaatgcacaggaaacagttcaagatgtcaatggtgtcaaacgtgaaatcctaacaactgttcctgacgaagaacaatcaggaattgaagaggaaacttcagttgactctgaatccgacttcaacgcaccagactttgactggagcggtaatgatgaagctgtagcggctgaggctgaacttcaagctgcaaaagaatcagccattgctgaagtaaaagcagcaggttttaccgatcaaaaatatgtagattggattaatgcacaagaaacagttcaagatgtcaatggagttaaacgtgaaatcctaacaactgttcctgacgaagaacaatcaggaatcgaaggcgaaacttctgtcgactcggaatacgacttcaacgaaccggaaattgactggagcggaaatgacgaagctgtagctgaagaagaagcagctcaagaagaagtttacactctaaactactacgctcaaagaacacaaggtcaaaatggtgcgacaaccgttaaagcatcaagcccaagagaagctttagaatacttccaagctttcttgaacgaaaatggtttagatgcagctgacttcaactggtcctatgacagtgaaagcagagcattcactgcaagtgaaaaaatcgaaggcgaagcttccgttgactctgaatacgacttcatccgaccagactttgattggagcggtctagaagaagcggaagacgatgaagaagttcaagaagaaatttacacctttgtttatatcattcaaaacaccaaaggcaaaaatggtgcgactactgtcaaagcatcaagcccagaagaagcaaaagcttacttcgaagaatttgccaaagaaaatgacttgggtgaattagactggacttacgatgaagacactaaaacattcaccgcaagagaaaaagtggaagaaagccaaacaatcgaaggggaaacttccgttgactcagtttacgacttcaaccgaccagaaattgattggagtggagctgaagaagtttatgaacgtgaactccaagcaacaaaagaagcagccattgctgaactccaaggtatctacattaaagacgaagaactcttcggtcgcattcaagatgcagaaagaatcgaagaagtcaaaaaattgagaagtgatgccatcgatgctcgccaagcattagttggtaaacttgatgaccaagaagcttccgcggattctgaatacgacttcgttcgaccagacgttgacttgactggtctagacgaaggctacgcacgtgaataagcagaagcagaagctttagaagcagcgaaagcagaagctattgaagaattaacagctgatggcgtgacatctgacctctggtttgaactgatcaacaaagccaacactgtagaaggtgtcgaaagcctcaagaatgacattcttaatgcacgtgaagatcaacgtgaacaagcagaagcagaagctttagaaacagcgaaagcagaagctattgaagaattaacagctgatggcgtgacatcagacctctggtttgaactgatcaacaaagccaacaccatagaaggtgttggaagtctcaaaaatgatattctaaatgctcgtgaaagacaacgtcaagaagcagttgctctagaagtgggaaaaacagcggctattgcagatctagaagatttattgggtacctcagtaactgaagatttaactgatgacgaaaaagctttgattaatgatgctaaaagccttgaggaagttaataaagttaaagctgaaatcattgataaccgatctgaagtgtacactttaaaattcatcaaagatggcgaaaaagattatagaaatactaaagccttgcacccaggggaagcaagagaagtcttcttaaactttattcaagaagaagatcttgttgtagttgtcttacattatgatgaagaaaccaatacctttactgctgttcctgatgggggagaattagaagtcagggaagaagaaggctacgatttcttaccagatggagttttagaatttgaagaaatccaagataaagcaaatgcacaactgcttcgggaagcacaagctttgcaacaagcgaaagaaaagtcctatgaacaattgaatgctgctggtataacttctaaaggattgtacgaaagaattgccaatgctaattcagtagaagaagttgaaccgttaacagaagtcttcttagaaagtcgtagacaacaactagctcaagaccttgctgtagcaaaagctcaagcaattgaagagttagatgctaacgaagctgaaagtgctcgaatcaacaatgctaattcagctgaagaattagctcaagtaattgaagaaattcaatctgaacgagctcttcaattggcaaaaggtgaagctattgtagaactagaagctgatggagaaacaagtgaagcggatagacagcgaatccaccaagctgactctattgaagaagttgagcgagtaaaagagtatattctatatgagagattatctttcttagagagaataaagtatggctttaatagacttggtgattggttcagaggaatttttcaataatgtccttaactaatatccaacattattttgaggtgaaagctagttttaaaccaatactttgataattggttttacgccaaaaagcaatttgtagttgctatccaaatctgttgattctagttaataggaacttcaatcatgaggctcgacatatcgtaagtgatatgtcgggcctttatgatttttaaaattattcacttgataaaataatcaggtctataggaagctaggctttgaaaggagtgatgatccatcaggttaaatttatactaagacagggcataacgtgctttaaatctacaggagaaagacaaataatacaataaactgtgagatgattctaatgtgtcattgtttaagcaatagggatgttcttaagctgtaaaaactggaaaaataataaaatgttccatatttagcatttttctggtaaaaaacatcaattttagtaaataagcaattaagcaagcatttttaaaaatgataagcttattaactagatggcctatgactattttattttagtaaaaccgtgaaattacttgatttatttgagctattatattaatataatagctagttacgtggcagtagtgtgctagtaacgaagagctcaaccctatgctttcataagctaaatagttgaagctatttactagcataaaggctgagtgaatttgtttaagtatacttaatataaaggagttttagaatggtaggaaaaaacaactataagacacgtaccgaaaaagctgctaacaaaaagcaacgtttctcacttaaaaaattaagtgttggtgttgcatctgttgcagtcggtacaacattatttttaggcaatgcagaaggtgtttcagctgaagaaaatcctgatgctactacagctgacgatgcacaaggtcaatctacccgtgattctggttataactttaacgaaccagaattcgactggagcggagcagatcaagaatacgaacgtgaacaagaagaaaaagcccaagaactacaagcagcaaaagaagcagctattgctgaagttcaagcagctggcttcacagacgaaaaatatgctgattggatcaatgctcaggaaacagtgcaagatgtcaacgcagttaaacgtgaaatcttaacaactgttcctaacgaagaacaaagtggtattgaaggtgcaacttcagtagattctgaacatgacttcaacgcaccagaaattgactggagcggagcagatcaagcatatgaacgtgaacaagaagaaaaagcccaagaactacaagcagcaaaagaagcagctattgctgaagttcaagcagctggcttcacagacgaaaaatatgctgattggatcaatgctcaggaaacagtgcaagatgtcaatgcagttaaacgtgaaatattaacaactgttcctaacgaagaacaaagtggtattgaaggtgcaacttcagtagattctgaacatgacttcaacgcaccagaaattgactggagcgaagcagatcaagcatatgaacgtgaacaagaacaaaaagctcaagaactacaagcagcaaaagaagcagctattgctgaagttcaaacagctggcttcacagacgaaaaatatgctggttggatcaatgctcaggaaacagttcaagatgtcaacgcagttaaacgtgaaatcttaacaactgttcctaacgaagaacaaagtggtgttgaaggcgaaacttcagtagattctgaatatgacttcaacgcaccagaaattgactggagcggtctagaagaagcagttgctgaagaagaagcacaagaagaagtttacaccctttactattacggccaacgaactcaaaaccaaaacggtgtcactaccgttaaagcctcaagtccaagagaagcgctcgaatacttccaaaactacttgagtgaaaatggtttagatgctggagacttcaactggcactatgaaagtgatgaccgagtctttaccgctagcgaaaaaattgaaggcgaagcttctgttgactctgaatatgacttcaatgcaccagacattgactggagcggtctagaagatgcagtagctgaggaagaagctcaagaagaagtttacaccttttactactttggtcaacgcactcaaaaccaaaatggtgcgaccactgttaaagcatcaagcccaagagaagcactcgaatacttccaaaacttcttgagcgaaagaggtttagatgctggagacttcaactggcactatgaaagtgaagaccgagtctttaccgctagcgaaaaaattgaaggggaagcttccgttgattctgaatacgacttcgttcgaccagacttcgactggagtggcctagaagaagctattcaagacgaagaaaatcaagaagcagtctacaccttcgtttatatcactcaaaacaccaaaggcaaaaatggcgctactactgtcaaagcatcaagtcctgaagaagcactcgaatacttccaaaactgggcaaaagaaaatgaccttggcgaattagactggtcttatgatgaagatactaaaaccttcaccggaagagaaaaattagaagatgactctgatgatgattctggtgacactggtgaagaaaaacctggtcatggagattctgacacaggtgactctgactcagacgactctactgaagacgaaactgaggaagaaggtaaagaaggctcagatgaagcagatgacactacttctgatgactctaaagaccaaaaacctggtcaagttgcaccagttaaacttggtaaaggttctgaaggtcaagtagctactccagttcaagacagcaaacaagtttcaggtcaaaaagctcctgctggtcaagcacaagcttctaaccaggaagctgctgaagagtctggccaaactctaccagatacagctacttctgcttgggcactaggcctacttggtctatcaagtttagctggtggattgttcgctggtaaaaataaagaagactaaaccattttaaatctcactttgtaaagtacaatattggattttgttgtacaattcaaaaaaaccgatcccaaaaatggggtcggtttttatattgtctcataaatgtaacacaaataattgttactatataaactcaatccatgtaaatgataacaaacattttataaaaagaattatttttctatggaaaaaagaatattacccagattgattaataataaatctgttagcatagtctataagcaagacttaacgataatactatatcaacaatgttggtgattgatactaaaggtttttaagcttatgtatcatgaacccatagtacctttattgtaaacttatctcccaggttaaggacttgtttacgactattatatttaataaatagtcaatcttaagaattgcataaaataactttgctaaattagtagtaatttagtatgatgactatcagatatatttcaaaaccatgacaaaggtaaagaatatttacaactttgatcgactatattttacattattagcttgactttcccatcctagtaggctatattttaaccataccaagttgacttagtataagagtaataagggcaaagggctagtaggttaaacttgtcatatgatattagtacatattactcattgctaagttaatggatatagaaaaggagttttaatatggttggaaagaacattttaaaacgtatttcaaaaagacagccaataaaaagcagcgcttcacacttaagaaattgagtgttggccttgcatccgtagcagtaggtgctactttatttttaggcagtggtgaagcggtttcagctgaagaacctcctactgaagaaaatgaagatgttcctgctgaagatgttcctgctaatgaaaataaaaatgatggtcaaatagatgaaggtaaaacaccaggtgaagggacatctgctaacggtggcacaggtcaagtattgcctgatgcaaactctggccagaaaaacggtggagatcagcaaagtacaacacaaactgaacctaaaggactagcagaaaaccctgaaaatggttacttgactccagaaaatgctagtgcagcagcagaaaaagccttggaaacagatccagttaataaatccttcacagtaagccaaggggcaaacggtcgttacttctatcaattgacaccgaacccagcaccagacaatggtggggacgaagacaaagagccagaagaaaaccttgaaaatggctacttgactccagaaaatgctagtgcagcggcagaaaaagccttggaaacagatccagttaataaatccttcacagtaagccaaggggcaaacggtcgttacttctacctattgtcaccgaacccagcaccagacaatggtggggacgatgacgaagagccagaagaaaacaatcaaaatggctacttgactccagaaaatgctagtgcagcggcagaaaaagccttggaaacagatccagttaatgaatcctacacagtaagccaaggggcaaatggccgttactactacctactatcaccgaacccagcaccagacaatggtggggacgatgacgaagagcctggcgaaccggaagagccaggtgaagaagaagcagtttacaccctttactacttcgcacaacgaaccaaaggcaaaaacggtgtgactactgttaaagcacctaattccgatcgtgcagaagcatacttccgtaactgggtaaacgaaaatgacctaggcgacctcgaatgggaaagttacgatccggaaactaagaccttcatcgcccgtgaaaaagtcgaagaaccaggcgaaccaaatgaaccagaagagccaggtgaagaagaagccgtttacaccctttactacttcgcacaacgaaccaaaggcaaaaacggtgccaccactgttaaagctaaaagtgcagaagaagcagaaacatacttcaaaaacttcgcaaacgaaaacgacctgggtgacctcaaatggtcttatgacgaagacagtaagactttcactgctcgcgaaaaagtcgaagatccagatggcgaagaaccaggtgaagcaagaagccggggcgaagacgcagacggcgaacactatgcggggaagacccagatggagaagacccagacggtgaagacccggacggtgaagaaccaggcggggaaaaaccaggtgtagaaccaggcggcgaaaaaccaggcgaaaaaccaggcgagcaaaaaccgggtgaaaaaccaggcgaaaaacccggtgagcaaaaaccaggcgaaaaaccaggtgagcaaaaaccaggtgaaaaaccaggtgagcaaaaaccaggcgaaaaaccaagtgagcaaaaaccaggtgagcaaaaatcgggtgaaaaaccggctgaacaaaaaccgggtaaagaagagaaaccaggtcaaactttaccagacactgctacttctgcttgggcactcggactactcggtctaacaagcttagcaggtggcctattcactcgctaaaataaagaagactaatcattttaaataatgaaccagtcttgaaacacttattaacctagcctaccattctaaaacggacctacccaatcaacgattgggtaggtttttttgggttctataatatttaatgttggtgggcctctccccccactcttttatttttgtcaatgaaaaagaccagtagaatcctcataattaagccaccatcaaataatcattttctatcgaattccggtcagctagctttcttgcgcctgttccttctattgacaagttttcctaattcctatattttaattttatagttttttatttgatcgagcatatagaaaggtgattttatgtccaagcctaactggtctaaatggtcccgtcttgtcctccttgtctttgccctctgttttcttccggcttgccaatatctacctgagcttctagattctaatccagaccaaaccagcatgacgctagagcctaatgaggagggtgacttcaaagcgcccagccaagttcctgaccaagcgggggaagatgtgctggtcatcaatgacaatattccttacttcagcgatcaggatatcactagccttgatccttaccacagcaatgaagacctggatgacttggaccgggttggggaggctaatgccttgattggaccggaatccttgcctagtgaagagagaggggagattggtcaatttgaacccactggctgggaccaggcccggtatgcgaatgttggggcgggtggctggctgtacaaccggtcccacttgattggctaccaactgactggtgttgatgactttgaaaatttaatgacagggacacgttggttcaatgaggccatggcggactttgagaactttgttgctttttatattgaggaagaagataaccatgtccgctaccgggtgacccctatctttgaagaggataatcgactggcctcaggtgcctatatggaagctttttccatcgaagataacggtcaaggggtcctgtttaatgtctatatacccaatatccaagaaggggttgctatcgattattctgatggctctagtcagggacctgctggaccgagccaagatggggacttgccagacttgaattcatcccaagatgaagctagggaagaccattcagaatcctgtccggtgaaaggcaatattaatagccaaggtgagaaaatttaccataccccggatggccgctactatgaccaggtcgatattgatccagaatcaggtgaagcgtgtttccaaaatgaagctgaagctcaagaggctggttggcgagccagtaagcagtaaaaaagccctcccaaatgtaggggggcttttttcatttgactgaatttagtctttttctttcattgagccaagtttcaacttagttttcgtagtattcagcgtaatagtcatcaatttgattctcttcttcttgttcttctggaacttcctcactgtagatcacatcaataaatttattgtcgtcgaattcttggtcatctttctcccgtttcaacccaacctgattgtattggcggaagttatctaggagtttaacaacaggtctcataaagaagaagaagccaccgatgacaaataatatcgaaccgattgccatggttttttccgataagaagaggagggacccgataaagtacaagatccctacaaagatatccagggataaggagaccaaggagtagtagttggggtaatagagtctgagtggaccaatcttaataaccacatctcggtccgcattttcattccagttgtaccagtttgaatcatcctcctggtttttgtcatcttgagactggttgccagagtccatgccatgattgcttccttgggtttcctctgtagaccacttgcttgggccctggtcgtcattctggtaattggccataagggcgggttggggcttgaaagtatcacgtcccaccagttcgattccaaaaaatttagatttaatttctttacatttattttctgccatctctaactcctctcttgtcagtgttaacggatttttgcgacgcgatttattatagcagaccaagtctttcggacacaataggggtaatctgaaattaaataattttttattttcgaaaaaatttaacctgtaaagaaaaaatactttacaagtctggagcgacctgttaagatagtcattgtgagttatggagctcagtcaaaatactagacatggaggtgaaaaaatggcagttaaaatccgcatgaaacggatggggtctaaacgccgcccttactaccgtatcgttgtctcagattctcgtcgccacgtttcaaaagggtccattgaacaaattggaacttacaacccaatttcagaagaagaggacgtcaaaattgacgaagaattagccttgaaatggttacgcaacggtgctcaaccttctgattctgttcgcaaattattgtctgataaaggtgttatggagaaataccataacgaaaaatatggaaaataatcaactcgataaaggtggtaaaatatgactgatcaagaagtgaatgatttagaaacaaatggtcaagaaacaagtgaccaagaccgagatgaaggaactggtcaagtactaaccgaccaagaaatgagagaattaattcatacgatagtcaaacccttagtaagtcatccggaagatattgaactcaaccttcaagatactgaagacttccacgagtacttgttggaagttcacccagatgacgttggtcgcgttattggtaaacgtggccggattgccaaagcaattcgtgccattatctacagcatccaatacgaaggaccaaaacgtgtccgattaaccatcgttgactaagagtcagcttttgagggggtgtccttgtgacacctcctttttcttattataataaaggaaatgcgctaagaaggtgaaagtatgacggaatactaccgggtgggagatattgttaatacccatgggataaaaggggaggtccgggtccaatcggtcactagctacccggaagaacgctatcaaaaagggcaggtcctaacttggttaaaccaagcaggggaacaggccttggacttggtggttcaggcccaccgcctccataaaaacttccacttattgacttttgaaggttactccaatatcaatgaggtggaagcctttgttgggggaagcttgaacattgaggctagccaggtggatgattttgacttcgaccagggagtcttttaccagcatgatattgtgggtttgaaggtggtcgatgaaacaggccagccgcttggtcaagtgaaagagattattgaaaccccagccaatgatgtttgggtggtagaccgacctggccaaaaagacctcctcctaccctatattgattcggttatcttggatttggactttgaccgccaggaaatcaccgtacatattttagaggggttggatgattaggtgaagattgatattttgacgctgttccctgaaatgcttgaagggcccttgagtcagtccatgatgaagcgagcccaagacaaggggttagtggatattcaggtgaccaactttcggcagtatggccaaggtaagcaccagcaagtcgacgacaccccttatgggggcggggccggcatgctgctcaagcccgagcccttgtttgaagccatggacgagatcaaaaaagaaggcggtggtagcccccgggttatcttgatggacccagccggccagccttttgaccaaaagatggcagaaaactttgcaaatgcttcccacttggtctttatttgtggccactatgagggctatgacgagcggatccggaccttggtcacggatgaagtgtcgctgggtgactatgttttaaccggaggggaattggcggccttagtcatgatcgacgccagtgtccgcctcctgcccggggttttaggcaaccaggcatcggcccaggctgattcccactcctccggtctgctggaacacccccactacacccggcccatcgagtaccggggcatgacggttccggaagtcttgcgcaacggcaaccacaaactgattgaccagtggcggcaccaggagtcattaaagcggacagccctccgccgacctgacatgctggctaaattggatttgagtgaagaggaccaggactaccttgaccagttaaggaaccaagaataaacgtaagacaccaaaaaagcaggcctcataaaccggtgctagacagtttatggggtctgctttattttgatgcttgcttaaaatctaagcttagtttcaaagcatgcccgccgctagttacctattcagcttttaagaccaagcgcttgtacttggttggggtaattccttgcgactttttgaagaccttggtgaagtaggaatggctgttaaagccagctaacttgacaatttggcccagcttatacttgtccaagtggaagtaatacatggccagggcaatccgctgttcattgatataagtgataaaggtcatgccggtttcagctttgaacttacgggccaagtggacagggtgcatcttgtggcggtcagcaatttctttgagagtcaaattacttgccaattctttagagatttcgtagacaatgtctttaatgatgtctgaatagccaatggtggagtagtctgctacggcctgggcatactccctgggcagtttgtagaagacatggtcaatcaagtaatcgatggtctgggctttttcgattaagatggaataccgctcagatatcagatataaggtgagcggtaggaccccgccatttttagctgcaattcgactgtaggtattcatattaatgatactgtttttaaccgtacgcaaaacatccatttcgtcattgctgtggtcagccacttgttggatgaatttttcggtatcaacttcatcaagcgtctggttgagtaggtctaacttaccctttgtaatttcatcggtcaatgtattttcaatgcggtaatgtaagccctcagcttcttgatgaagttcttgcaatttttccaaccggtccaaatcgtctggtcctccttggtcggctgtcttaagattatactcatttgccatagaactatcactcctaactgagatgcgtttgattttcggaatatattacctccagttagtactattatattaaatattaactaaaaaaccaatcattagggtcacttttcctaaaataagtccatctttagacatatttttaatgataagtgtcacttccgcccatttttgtagcaatccccccactatggactgacctaggagcaggagggttgtgttaggggtctaggctattgaagaaggcttggagtttgggatccattaagtcccattcttccctggtcgggtagtccatccccataatatgtttgagggccccaatgactttttgctgctccatgtactgataaatatcccttgggtcggggagctgggtctggtagcggagcttctgggtgtagtggctaatcacattttcctggttggggtaatggtccaaaaagccataatgacctgctgtataaatcctgatagcctggtgaataagagcaaggagagaactattgtggaccattttatcaacttttttctggcttagggggatgaccaattcattgtaagtggccgtcttcagcagggtgtggtccttatcacctgtatgataaaccacgttatgtaagcctatccaatttactgaatcctttgaaaggcccttctcaggtgccaggcaaattttattcaccatgtaagggcacttttggtggatcttaatcaacttccctaactgggaatgggtcgagtagggtaggcccttatggcggaaaaaccgttgcatgatgacagcagtcgattcgcagctcttaataatagtcccatcggtgtagaagataagactttggtaggattgatgaccggtgacaaccttaatgtaaagagcctggtcgtttaaacaaaccctgttttgttctaaggcgatgtcaataaaagtttgttcgctttggtccagtaaattataggtaaaaggcctttggtcaaggctttgggctgggctggcttgatcgaaataatagtctaggtagcgctttaaataacgtttataatcaaaatgattcatctcttccattaatttcctccacaaatgtaataataggcccaaaagtcaacaaccctccttcacttctactataataaatgatatcacagtaaaacaattaagaaaattataatacacccttggcagggcttttttacaataaattaataatggaatagccagtaaaatgcgtatattagagtgcaagtatttttgaatggtggtgcaagcaaatgacctatttccttgtctttatttatgccagtattttaggctctttttatgctgttttggctacagacccgaccctatcaggactggtgaggcggtccaagtgtgatgcttgtggccggaaattaaaggctttagacttaattcccatcctatcctatctagggttgaggggtcggtgtggggcttgccgatctaagataccccttgtttactttttagcagaaatgttcatgggacttttggcctgtctagccttttaccgccaggggtggtcaagagccttcctgtttgagttccttgtttattctttgctaattatcttatccctatccgatattttttatttacgggttccgaatgtcttacttctggtgtttgcccccgtattaatttacttttcacctttgacctggcaggggatggggctaggtttagtggtctctttcttcgtcctttttttaaccttttccttttctaagggaatggggatgggagatgtcaaacttttcttagtcttaggtctcgttttaggctaccaggctaacttgctcattatgggactggcttccttcttggctactggctacttcttaatgagccgtgagcaaaaactcccctttgtcccctttattttcatcgccactgtcttggcaagttttttgctaactgtcttttattaaaccagaaataattaggcctgtagtcaaagactgacgattaaccgataatatgttaaaataaataggactatgaagcgactattatctaagcaggaaaatctttttggagtgaagaatcatgtcctacgccatgcaagttattgaccatattcaaaatgatgaattaaaagaagctcaagaaagtctagaccaagccctcaattttgaccaggctgatgacttgtacttgcttgctgactctttatttcaattgggtttcctagacgccaccaagcaagtcctggaccatcttttggacctggatcctggtgatgacgacctccggatttacctggccgagattgccatcgaagaaggggaggaccttgttgccattgactggttggaccaaattgcccccaacagtccggcctatgttcagtcgcttttagtggcggctgattattaccaaatccaggggttgcctgaggtggcagagtctaaacttcatgaagcccagtccttgatgccggatgagcccattatttcctttggcctggcagagttttactatacgaccggccagtacaaacgtgccatccaccattatgaagagaccatccagatgggggccagtcaagtggccggtattcaggtcaatgctcgcttggggacagcccatgcggcagcaggggacttcgaccaggctttagcctactttcaagaagccttagaagagaaagaagatcccgacaccctctttaacctgggcgtcacctattttcagctggaggaatacagtcgctgtgtcgaaaccatgcgccagctccactccctggaccacacctacacttccctctacccttatttagcccaggctttggaccaaacacaccagcatgaagaagcagcccaggctgttgcagaaggtttacgtttagacaagaccaatgcccaactttacctgatcggggccaacattcacattaagttggaccaactagaccaggcccaaacctatttccaggaggcttatgccttaaaccctaacagcgaaacgttgatcatcgagtatgctaattttttgaattacctgggccacttctctcaatcgatcgagatcttgcaaaaggccctggacgaaaatgatatagatccgcaattttactggctcctagcttcggcccaaaacgaagaggaaaactttgacttggcccggtcttattttgaccaagcctacccttactttaaagataacttggactttttaagggaatacctggccttcctccaagaagatgggcaagtggaccaagtcaaaagcatagcccaagactacttggcactggatccttcgaatattgaagtcagatccatgctggagcgattaaaggatgaagaagatttttttgaaggataaggtgatcttatgccgaaccgtatcaaattagaagataagaaagcttttattaaatggtttacggagacccagcaggttagaagacgggagtccctttggattttaaactatctcttaaaccacgatattgttctcaacaagagccattttgtcgactacgctcatgccaccccacggggtatccggattgcggcggcaaacacccagggcagaagtttccttttttacaagggtggcattgaatacgaagaccctgagaaagccttccatgaaatccggatgaactggcacgaacccttgtatattgaagttgactttgtgggcaaaaatattagcccggcctatgtcaaggtcttggaagataacccttatgctcgttggaatgaccgagttccggctgacctggttgttcaagtggaggacgccttggataacttccagctcaatgtgcgcaaggaggaaatccaccaggccatcgaccaggccttgcaggaagatgacaaggagaccttctacaagctaagccaggaattaattgatattaacaattacttgaatgaagagaacaagacctaatcttcagaccccttgaaagggactggagtctaaagccaatagctagaggagggattaaatgacggatatggcagacatgcaaaaacaggtagacgagtttattggccaatttgaagtaggctacttttcccccttagccatgatggcccggctgacggaagaaaccggcgaattagctcgagagattaaccattaccatggggaaaagcagaagaaggctagtgaagaccccaagtctttgcaagaagagttgggggacgtcctctttgtggtgatttccatggccaatgccttggagattgatttagaccaggccttccaacaagtcatggctaaatttcaagaccgggacaaggaccggttcaagcgcaaatcagaccagtaagattcagcaaatgaaggaatgatgacgtgggaaagtcatttgaagataaagaaaaacaaaaaccaggtaagggtcaagacctagcccgagaaggccgggtcgacctaaaccgcctcccagaattcaagcaggctcttccggtcttagataccctcattgaaggaggctatgaggcttattttgtcggagggagtgttcgtgatgccttgcttggcctagacttgaatgatgtggacattgcaacctcggcccaacctgaagaagtcaaggccttgtttaaaaagacggttgatgtggggatagaccacgggactgtcatggtcctccaaggagggacctcttatgaaatcacaacatttcggaccgaatccacctaccaagaccaccgcagacccgattcggttcattttgtgcgttctttagaagaagatttgaagcggcgagacttcactattaatgccctagccttagaccgaaatggggcggtgaccgacttatttgacggcattcaagacttggaggatggccttatccgggcagtgggccaggcagaagagcgctttaatgaagatgccttgcggatgatgcgggcagttcgctttgctggccagctcggttttgaaatcgcccaggacaccaaggcggccattaaaaaacaccgccagcttttagaagagattgccgtggaacggatccaagtcgagtgggttaaattattgacaggtcaggaccgccagaagggggtaaaggccatgattgagaccaagctctatgactactgccccctcttaagcaataaaaaagcggccttgacctacttggtagccaacccccattcgcttgactctgaccgccaggcctgggccttgctcttgtattacgtccgctatatccagcccaagggttaccaggaagacattaatacttttcttagaacttggaagacttccaaggccatggtggaccaaacggaaatcttggttgaaggcttggaagaccggaaaaatggcaagtcactggatccttatgccatctaccagcagggacttgacttgagtttagatattgaaactttgctggaagtcttaggccaagaaggtaagcaagccgaagtgaaggagacctaccaaaagctagccatccactcctccagtgacttagacctaaccggctatgacctgatggaagcttatggtcgcaagccagggccttggttgggatcagccctcaaccaggccgaaaaagctgttgtccgaggcgattggcccaatgataaaaaccaattactccagcatttaaaagactatgcaatagaagacgaaaagcaagatgattaggaaggaggggagagatggaagaccccaatttatatgccatagtggatatcgaagccaccgctggtagtttagggactgatgagcggatgattcagtttgcctgtattttgctggaagacggccaggtggttgaagagtttgataccctggtcaaccctttgcgaccggttcccattcgaatccaaaaactgacgggaatttctcaaaaggaggtcaaccaagcccctcactttgatgagattgcccatatcatccatgacctcttagaggatgcggtctttgtcgcccataatgtcaattttgactaccggtttttaaatgaacgatttgaagcggtgggtctagaaccccttcaaaccaaggccatcgacacggtcgccttgtcccggatttgcttcccccaggcggaccactataatttgaccgatttgaccacttggctgggctatgacattgaacaggcccacgatgccctctatgatgcccgggccactgccttcctgctggataaaattataggcaagctagccggcctacctccccttaccctcaagcaggtctcagacttaagccagggtttggcccaggatacccagtggttgattgaccaggcatataaccaggtgaaagaccagtcgcctgacttggaaaatggcttggttttttatgaaggcttggccatcaaagaccccaaaaaatcctttgatatccgcctctcccggtcgctcaaggattacccactgacagatagggacaaggctaagttttttgccaagtcctttcgtctgcggcagcgacaaggggacttgatggaccaaatttattattattttaacaaagacaaggaaaatgaggagctagccattgaagcaccagctgggatcggcaagtctttggcctacctggtacccagtgtttttgtgggcaagcccgtagtgatttcgacccataccaggaccttgcaggaccaacttctagaagaagccctgccctttatggagcaagtcagtcccttaaaaccaaaagtcttagtcttcaagggctgtcaccactacttatccctgacccggtttagccaggccctcaagtcagttagctcaggggattctgctgctatgatcgccatgcaggtcttggtctggttgactgaaaccgaaacgggagatgttgatgagcttaatattgacagcctcaaccaccccttttggcaggccattatcacccggtatagccagcttccacttttgtccgaccaggatttttataaacgcttgatccgccaagccaaatcagctgatatcgtcattaccaaccatgcccacctgattaccgacctaaaccggatgcccggccaaagagtcttgcccaactttgaccacctaatcatcgacgaagcccaacacttggccaaggtaaccgggggcttggcccaaagttcactgaacaagtctaaaatcacccgcctgctccgagccttaggggactattctagtgagggaaccctcatcgaccggatggaagactatacccaaagaaggtggctaagccaggcccaaatccaccgactagttacttgccgaagtcgcctggcagaagctgtcagctacttttttgacctcttcattccttccttagagatggaaggcagacaaggctggctggaagaggttatcgatgacccggaagccattgctgacttagaccagaccaagcgtttaggtatctgcctaaaccaattaattcaggagctccaaacaatctaccaagatttgaaaggcttccaggatgccttcgtcaagtcagaccacctcttgcttgaagacctctttactatctccaaccgattaagtgacttttaccgggattttaacaagctttttggtccttacggcagtgaccggctcatttggattgaagcctatgcttcctccttggataccagtatccggctcaagagttttagccaagggaagaagggtcaacttttagccaacctccatgccgttagccatgtcatttacatttcttctaccttgtctgtcaatcaatcggtcgacttttttgaaaagcaagtccaggctaaaaagcttaaatacctggcctatctcagcccctaccaagtcaaagaccaggctcagatcatcgtacccaaagacctggttccggttaaaaagttctccaaccaacacttggtccatcacctggtcacccaaatcatgaccatgatgaaaaacttgaaccggaaaacccttattttatttcactctcatgaagtcctccaagaggtctaccataccctgacagcttctggtatgctgtcggattatgccctcttagcccaagacctgtccgggtcacggtataaaattctcaaacaattcaaacgggctaagaagagcattctgtttgggtcggataccttttttgaagggattgacctacctggcgagttcctggaagttgttgtcctgacccggcttccctttgattcccctgacatgcctctggtgaaagatgaacaccaaaggatgaaagaagaggggatgaatatctttaaagatgacctgttgccccgggctgtcatcaagaccaagcaggcttatggccgtttgatccggtctgagaaagataggggagtttttgtcatcttggatgaccgctttctccatgctaactacgcttcgatttttcaacaatctttgccaggaggagaaaactacaagcgctgccttctaaaagatcttccccaagcggtcaaccggtttttaggggaggcttgtgaccttcatttaggctaaactggggatggggacggactaagagattgttggcacaagtcgtcagagacttattgggccccacttatttatttcaagatcataatttggtataatacccttgttatagctagaggaggaagaccagtgaccaaggtactattaggcttggctattttatttaccgggatcattctaggtggcttaaggctcttccgtgagtctacccagcccatctaccaggctcgggctgagacaacggcctatgtccaagaacatacggacctggaagaggtcaatgacttttattggtttaacggaccagaggaaagctatttttccgtgtccggcacaaatggcgaccaaactccccagctggccattgtcagaataagcgacggggccatgcaggtctttgactaccaggacattgccagtgaatacgatgtctaccagcaagttcaagcagacttgaaccctagtgaaattctcgccatccgagccggctttgtcgatgagaccacacccgtttgggaagtgtccttccttgaccaggcaggccaacttggttactattatgccaaccttgaaacagggcagtggctgcgtaccattagcaatttatagccagcagagcaaaagaagaatgaaggagattgagcagtggaaacaattcgtattatcaatgctaaagaccacgtcggtgaaaaggtgaagcttggggcctgggttgccaacaaacgctccagcgggaaaattgccttcttgcaagttcgagacgggtcggcttttttccaagcagtcgtggtgaaaagcaaggtgtctgaagaaacttttgaccttgctaaaaatcttaaccaagagacttctatctggattaccggtgaaatttcccaagatgaccggtccaaatttggctatgaaatccaggttgaagacattgaagtgatcagtgactcgcatgactaccccattaccccgaaagaccacgggaccgacttcttgatggaccaccgccacttgtggcttcgttcttctaaacagcatgccattatgctcatccgcaatgaagttatccgggccacccatgagttttaccaagatcaaggatttatcaagttggattcacctatcttggtgggcaatgctggggaaaataccaccgacctcttccaaactgagtattttgaccaaaaagcctacctggcccaaactggccagctctatgctgaggctgcagccttggcctttggcaaggtctacaccttggggccgactttccgggctgagaagtccaaaacccggcgtcacctgattgaattttggatgattgaacctgaaatggcctttgtggaacacgaagaatccctaaaaatccaagaagaatatgtttcccacttaattaacagtgtcttagacaattgcgactatgccttagaggttttgggtcgggaccaggacaaattgcgccagtttgcccaactgccttacccaaggatctcttatgaccaggctattgaaatcctgcaagaaaatgactttgacattgaatggggggccgactttgggtcaccggaagagaccttcctggcctcccaatatgaccgtcccatctttatcaccaactatcccaaagccatcaaggccttctacatgaaagagcacccggaccggtctgatgtggttatttgtgccgacatgatcgccccagaaggttacggtgagattatcggtggttcacagcgggaagacaacttggacaaactcttagaagaaattgagaacttcggtttgggaacggaagaatatgaatggtacctggacctccgccgttatggatcagtcccccactccggctttggacttggcttagagcggacagtgacatggttggcggggattgaacacattcgtgaagcttcccccttcccaagactactcaaccgaatttacccataagttcttacaagagacttttaaaagggacatggcctcgggtcagggtccctttttataaatcatgaaatgtactttaacctagccaggttagatagaaaggagagggcacatgatggatcaatcgctcattaaaaaatgggttaaggctggtaacttgaccatttcccgtctagttttggcccattaccgagatcttggcctagacgaagtagacctcgtgaccttgctggaacttaagtcggacttggaccaggggcaagtctttcctgaccccaaggacctggccaagcggatgcatatcagccaggaccaggcctttgaccggatccactccttgatccagaagaaggtcttagagatccaaacagctaagggacctgacgggaaaagtcaggatgtctatagtctagatcctctgtacaaccggcttctgacttatttggaccaaaaccagcacaaggaagaggctaaaaaccaagaagaggcagccaatcgcttgtacaagatgtttgaatctgaatttggccggcccttgtctcccattgaaattgaaaccatctctgcctggattgatgaagacaagtaccagcccggattaatccaaatggctttaaaacaagcggtcttaaaccaggtctacaacctgcgctatatcgaccggattttactcagctggcaacgaaaaaatattcggaccaaggaccaggtcctagctgaagaagaaaagtatcgcaaggctaaggaaggtcggagtcagccaggttctgatcagtcaggcaaccagccacaagttcccctctatgactggcttcatgacctgaaagacaaggaccagtcacaggagtaggcttgtataagtcaactattcccaatctggcagccatttatatgaaaggtcaaaaaacaaccaggaaggtgttagcaagttgacaaaattattatccagtaaggaaacaacccaggtggtcaaggcaatgggcaagcttttcccaaatgccaaggcagaactcaaccatgacaatgcctttcagcttttaatagctgttattttgagtgcccaaaccacggatacggcagtaaacaaggtgacgtccaagctctttgaagcctatccccggccagaagacttgaaagaggccgaccaagcagatattgaagacaagatcaaaaccatcggcctctaccgcaacaaggcaaaatttatcaagcaatgcgccagcgatatcgtggacaagtttaatggccaggtgccttctaaccgaaaggacctagagagcttggccggggtagggcggaaaacggctaatgtggtcatgagtgtggcctttgaagaaccagctattgctgtcgatacccatgttaaccggattgccaagaaattccatatagcagcagaagacgactccattacccaggtcgaaaaaagactcaatgacaagttgccaaaagaattgtggagccaggcccaccattggatgattttctttggtcgctaccaatgtccagcccgcaagcacgaccatgaagaatgtgtccgcaaggtttatgatattatcgataaagaagaactctagctaatggtaaacggtaggaacaaaattgcattgtgcaacaaaataaaaaccaaccctttttatcaggtataaagcctgtcataaaagggttggtttaattgtataatgaaactaattacttaacagctaatttttgcaccttgtccttgctgggggtgacaaaataggtggtttggccttcataggtgacaaaaccgggtttggccccctttggcttgttaacgtacttgacttggacagtgtcgaccgggacggaagctgattcacggtacttgctgtaataagctgctagcatggccgcttcttctaatgtttggtcgctaggattggctgaccggacaatgacatgggagccggggatgttttgggtgtggagccaccagtcgtttttattggctatccggccagttaattcgtcgttttgagtgttgttgcggccaaccaggatatcggtcccgtcgctggccttaaagtggaagggtttggatttcttttgttttttgccttttttcttcttggttttgatcttgaggtagccctggctgcggagttcatcccggacctcttcgatatcttcttgggagacgacatccagctgggccaggacggattccaggtagtcaatttcctggcgggtagcctggatttgttctttcagccgcttttgccgggttttcatcttttggtagcgcgaaaagtaggcttgggcattgtcggctggtgatttttgcgggtccaggtcaatctcaatttgaccctcttcataaaagttatccagcttgatggaagacatcccttgttggacctcatgcaggtaggctgtgagtacttctcctttgactcggtagctgtcagcagcttggctttcttcttgctcttttataattttgtccagctttttgctgttttttttcaattcattgttgaccaggctaaagaggtcggaagccaattggtgggttcggtctcgttcagccttttggtcataaaagcggtctaagagctggcttaaagtcctgtagtctactcggtcacctgctaaagtggagtaggggaaggcagtgaatttttccttgccctggtccaattggtaaaggctgggttgcagtcctgccaggtcaaaggcctggataaagtcttggtaggtctggtcggggtttgaggcttggtccaagcgttcagccagctccttggcagcttggcgggagaagccttgcaggttatcttgaatggctttttggctagcttttttggattctttggtcacctggttaaggtcggagaagtcataggggttgaccttgtcctggctgggagcaggtttgtaggggctattgggtaaaatagtgcggtaggagttttggctcggcgagatgtgcttgatgctgttgataattgtattgtcagctcggtccagcaggataatattggaatgccggcccatgatttcaacgactaagataatatccatctggtctcccagttcattgcggctggctatattgaagtggacgacccggtcattttcgacctggtggatggactggagcaccccattttccaagtatttacgtaaaatcatacaaaaatggggtggctcttgggggttggtgaagtcttgctggctgatttggattctggcatattgggagtgggcggacaggaggaggttttggttttggcggttggcccggatacggaggataatttcgttttcatagggttggtagactttggctatcttacctccttttaagtctcggtttaattcttgaaccattgcatgtgtaaacaaaccatcaaaagtcattattcgcactccttttcatcctttttattatagcatttggcctagttgaggacaaaataaaataaatactttaaatcaattaattaggcttttatttttttaaaaataagatataatcaggctaggttgacctgaccttggctgagtgagccaagcctagacttgggtcaaatcttgccaactcctataaaaactgctatattgttgtataaatcaagtgttttaggagggctgtcatgtctggtggagtggacatacgaaccttgttggaccggatggatgagtttacccgcttgcaccgcaagttaaaccaaatgattttggactattatcatttaacggaatccagcgtcttcctgtttgatattatccaggatgaccaaatgaccttaaaagatatcacccaggctagtaaactggacaagtcaactattagccgccaagtcaataacctggtcaaaaaagacctcttgaaaaaattaccaggccaagataagcgttacgcttatttcgagatgaccaagtttgctaaggaccgctaccaatcctaccaagaagaagcagaccgagcttttgccgaccttttgtcttcttggaccgaggatgaaaagcagaaattatccattttactgatgcggttaaaccgggtctaccagtctgctatttaaccaactgatctgcaagggtacctaaactcttgctttcttgcttaagcgcttttatgtcaagatgactcagtttggacagaaattgttaatgtgatggagtgtgtaaattagatgaatcgacctaaacaaaccagtcgtttgactcggatgggaattattacagccattttgcttatccaaaacatgatcccttttttggggaatattcctattccacctttgaaccccactattattcatgtcacagttattgttgtggccttgtcaatggggatgaaggacgggatgattgctggtttaatctgggggctcatccggctatttcgtgcctttgccatgccggccaccccacttgaccccttaatttgggtcaaccccattatcaccattgtcccgagactcttaatcgggaccactaccgttttgacttatcaattactacataacaaagtgaggaataacaagctatcgatgggggtcgcatcttttatcgggtctatgaccaataccctattggtgatgttgtttatctacttatttttcaatgccgaaattgggcaagcaatgggtattgatgccagtaacctaggctatgccttgcttgtcattattgtgaccagtggtttagctgaagcggttttggctgcagttctagcaccgattgtggtccaggctttgaagcggttgcgacggtaagctagctaaagaaaaggaggaaatggtatgagtgatgaataccaaacaagagcggaaagaaacaagaataagaaaaatcaaaattttgcccgggctgacaagcaagataagcgagacaagaagaaaacttcaacctttgataaaatcttctatatcttaattgccctcttatttttaatcttagttgcctttataatcgttattatgaacttcagcgatggacgggctgataatgtatctgaagatttagtccaggaagataccattggcaatattcgtgacttgttccaggctgatggtagtggggatgaaggtggtgaagcaggtggtcaaggggaggacccagaccaagagtcagaagcacaggaagaagatactgatcaagatgaccaggaagaagacccagaagatgaggaagaaggggaagacggtcagggcgacgaatcgattatcaacgaaaacccaccccacgaccccaaccatgccaccgactactcggatgggtcagctgaccgcgtagaaatccgtgacaaggtccaaaccgtcacagggattgcggagggcgacttgattgaaaactggattggcaatgacggaccgggccgggttgaagcaacggtaactgaggcttcgaccggccagcaatatgtcgtctacttgcagtacggggaaggagagtggcatgtcgaaagttacagtcaacgatagtataattattataaatacttatgttacccgatttaaaggctagcttgttgcaaaaacagactagtcttttattgtgatttatttaataatgttagccctttctcagtttgggggatagataaaggcgaaaattttccttggtattttcgcctggcaagcctagttaatctttgtgaaatagtataatatcgttgaattttaaaattgaaaaagctaaaatatttattaagtcgaccatattgataagtcttaaacaattaaaatgaatgaaaagaagagaagggtggtgaaaagcgtgcaaaatgcttttaatatattaaaaaaagaaataaaggctaacattgaaaccatgttgattctctttgtcatttggatcgtcttattcgaagaaataacccccttcgtccttatttccggtatcatcttatcagtaggggtgattgtctttaccgaccaatttttgttgatttacggcaactatgaagatcggtatatgttgaatgtgggtcagattatccgctatgctttggttttattgattgaaattttctctgccggttggtccgtcattccaaacattgtcaaaggcgaaagcgatgtggccatcataactgttgtgaccgacttaaaggatgaattcttagtcgatatgttggccaactcagtcaccttaaccccagggacagtaactgtggagaaaaacggaagtgaactccgaatcctatccttggaatcggaaggacttgatgaggatccccaccaagttttacccctcaaggtcgaaaaattactgttgaaatttgaagaagagcagaaaggaaataaagagggtagataaagatgtcttttgatttatttgtattaattgccatgatgatcctatcgttaggtgccatctaccgtgtgatcatgggaccaactgtttgggaccgacttctcggctcgtcctttttttctgctaaggctatcgtgatggcggttgttctcggtgttgtaatcaatcgtacatacatggttgatgtcggcattatttacggaattctaggctttgtgagtgtgataatgattgcacggttcatagaaagaaaaggtgatatttagtggatgccttgaccaatttaatcgctaatatcatcattattattggcttgattttcacggccctgggagtctttggaaccttccgctttaatgacttttttaaccggatcctggtgacttctaaggtggatacggttggctttattaccattttgctgggttatatgatccggatgggcttttccttctttaccttgaaagtcttaatcctattagttttttatattatcaccaaccctattgccacccacgctactgtccggtctgccgatttaagagactacaagattaagaaggagaaatagccaatgtatgaaatcatcttacttatttccctagtcatcttggcttttgtcagtgttcaggcggaaaacctcatgcggacggtcatttacttagaggtcttttctctcctcatggccttagcctttctctactataatgcccctgacgtggccctggctgaaacggctatcggggtcggtttgtcaaccattatttacttagttgccatcaaaaaagtccgggtctatgacttggtttacatccacgagggaattgagcactttgatgactcagagattagggctattcaaaacaccattgtccgtccccttgagaaatttatcgaagagacggtagagcttgaaccccaagtaacctatactgaccaagatgttcaagccctactggataaggacaagcacgatatcattattgtcaataaggaagacttgatctatctttacggttataccaatgaccaagtcttccaggatatcgtcgggaacatgtatgatatcttagaaagtatcgacgacatccgtgtcgtataccgggaccaggaggtggcaacaaatgagtagtcgagctaattccatgatgttttatatccgcgtcctcctaaccttggctggaattgccgtggttgtttaccattttgtcaactttaatgaagacctgggtgcccccttgatggaattctttaccgataatttctatgctgagactggggctaagaacgctgtagctgggatttacttaaactaccggatgttcgataccctctttgaagccttaatgcttttggtatcggttatggaggttatcaatgtttcctggtccaacaagcaccctgctgccaaacctggacggccgaagatgattactttaaaaagcaattccgagatcataatccggatgatggggattgtctatccatttgttgtcttaattggtctttatgtcatcttaaatgggcacgtatctccaggcggtggcttccaaggagggaccattcttgcaacggcccttattacccgttacttagtctaccctaactttgacattgacttagacctgatggaaaccttcgaaaaaatcctctttatttttattatcctagtcccagtgacctatatctttattgacctcgtgcctaagtctaactttaccaatgaaacttacatgattataatgaacaccttgatcggcctgaaagttttctgtggcttaagtgtgatcttttatcgcttcgtattctttgaaggggcaagtaacgactaatactacaagcttagaaagtagatgaagtttatggaatttgcaaatggccagattgttggcattatcatatttttcgtcggcctttatggcttgatgactaaaaaatccattatcaaaaccattgtttccatgtccattatggagtccggtatttacttattttatgtcaatatcaactttgactacgccagtgtaccacctattggggatattgaagggatcttggtggctgaccccgtaccatcggccttgatgattacagccattgttatcggaataggggttaccgctattggcttgaccatgttcatgcactacaagcaagaacacggtattacccactggacccgggattcgagtaaaggacgtggaagatgatgcccctttatttatttgtcctcttgcccattgtggcggggctcgtctcttatggcttaaagggcatcatccgaaatatctttctcctcgtgttccagtttctttttgcaggctatgctttttacctcttttttaccgtttctgaccagggttccattttgtggaactcagctggctaccaagacggcttggccttgtccctctatgccgataccttgagtacttttttgattttgattaccgctgttttattcatgttctaccttatttacgggtcgggtcaagactacttccaaggtcagttcacctttttgtacttggttttacaaggtttgatctgtgggcttttcttgtccagtgacttgtttaacatttttattttcttagaagtagcgactgtagtagtttctgtcttaattatgatcaacaaagaaaaacaagccatttatgacgggatgatctacttctttgttaatgtcatcgggacaactttcttactcttaagtatcgggatcttgtaccagacctttggcttactggatgttcgctacttgcaaaaagccatgaccttggttgaagatccccggtccatgatcgtcccttttgccttgatgatggttacagtttccttaaagacagctgtttcacctctcttctcttggcttccaaaggcccacgggacacccagtgctccgccagttgtgtcagccttattgtccggtttatacataaagactggggtctacctttttatccggttttcagtcatgttccagcccgtcattgacatgtccgacttcttcttagtcattggttttatcacagctatcatcggctttaccatggcacttggccagcacgatatcaagttaatcttggcctaccacacggtttctcagattggcctcattatggtgggattaaacctgggacctgaaatatccttctggggtggggtcctccacattttcaaccacgccatctttaagtccaccttgttcttgacagccggagtgatttacgaggcatacggcacccgggatgtttacaagattaggggggtcatgaggaccatgcccatggtaggaattgccagcttgctttccattttagggattatgggggcaccgttctttaatgcttccatttccaaatacatgattatccatggaacggaagactatgtcattaccctacttctcaacttgattaacctgggtacgattatgtcctttgttaaatactcgaccatgctctttggggacaagttgaagaccagtttcgacaagcctaaacggtcagtccggttaactgttttggctttgggactagcttccttactaaccggagtgtttgcccggccgctaacagcctttttattaaactatgaatttacagttgaccttgctgagtacagtatgaaaacgattgtctttatctttatgtttattgctgcaattggcttctacaatggcaccatcaagcatgggggcattttggagcgaattggccatatcgagctaacctttaatgggatcatcactgctatggtcggctatctacttgttgttgttttctttggcaatttgatgatttaaccgtctttctgtaagtaaatctttgggggaggtctttggtgttattttatctcgttttgataccgatcttgttcggtgtcttaaatatattaattagcaagtgggatacccggatcccagtcttggttggacaggtcctcttattagcttataccttttacttgttctttttggttcgaagttccggggctattattgattttatgtctggcttgccagagggttttgccattcgtttatatgctgatattttgtcctcgaccatggtcttgttaaatgtcttgatttttaccgtactcttgttctttgcctataataaatcttatacgactgataaatttctctttcttgtttttgttttagaaggggttatgaacagtcttttcttgagtgctgacttgtttaacttgtttatcatgttagaagtttccaccctgactgtttctatcttaatcatgatcaagaaagagaagcaggccatttatgacggaatgatctacttttttgccaatgtcattgggaccacctttatgctgtttggaattggctttttatactccacaaccggtgttctagacatctatgtgattgctgacatgatggagtacatccaagatcctaacttggtccttttgccttatgctttgatgatgaccaccctcagtttgaagattgcggccgttccgcttttttcctggctccccaaggcccacgggaccccaagtgcaccgtcagtggtatcagccatcctgtccggtctctatattaaaacaggtgtttacctctttatccgcttctcctttatgtttggaccagtaattgatgcctccaacttatttatggtgatcggttttattacctcagtctttggcatcattatggctgtagcccaaactgacctcaagatgatcttggcctattcgaccgtgtcacaggtcggtttgatcatggttgggattaacttaggagcccaggtagccttcttcggagccctcttccatatattcagtcatgccttgttcaagtccaccctcttcttgtcagccgggcaaattgaagaccagtacggaacccgggacatccggcaaattaggggcttgtggaagaccatgcctttgacggccatttccattgtcttagctgcttttgggattatcggggcacctttctttaacggtagtgtgtctaagtatatgatggcatctggttcggatatgaccctctacagccttgccatgcacattattaatattggaaccattatttactttgtccgcttgatttccatcttatttggcgaagaggctaagatccgaaatccagaggctcatgccgttgacaaattatcggaatatacccttttattcctctctattgctatcttactgaccggtatcttctctccagtagtagtcgaagccctctttaactactccgacctaaccctcttgtccacttcttatctggaaaaaaatatattttttgtttttgaatttattgcaggctttgccctttaccaggggatcgtccggcgggaaactttgctggaagttatcaaggaatttgaaattacctttaacggcattatcacagccatggcttcattcttcctctttatctacgcttacggttttgtttttctctaaaaaagtcgtttagtcttgcacaaatgaaaaatcttttttattatagtagtgaaatgaaacacgtgcaattaaaggattgatctatatggataaattactggaggactccattaataaattaaaagaacataatgtccgcattacccctcagcgttacgctattttagagtatttaaccaccacagctgaccacccgacagctgatgatatctaccagaacttggttgatgattttccgaatatgagtgtagcgactgtttacaataacttgcggcttttgacccagatgcatttggtcaatgagttaaaatatggggatacttccagtcgttttgacttttcctcccacaaccactaccacgctatttgctcagtttgtggcaagattaaggatatttattatccaggcttagacgatgtggaagaagcgaccgaaagcctgactggttacgatgtggatacccaccgcttagaaatctacggagtctgccctgagtgccaggccaaaagacaagactaaaaagctgactgactaagatgacttcggccaccttagtcaccagctttttttatggtctttttgccccttcactcaactcagggagctagggtaggggggcctagctttaagttatttggttcagttggacgcactcgtctcaaggagctagggtaggggataggtcaatgttaattgtaaagtagggggacttgagacattttgggacctgtttatttcgtgccaaatttatcttatgaaaagaccaggccttgtatgctataatcatgtaatgtagaaaaatatgacgaaggagtcttcatttatggtcaagaccaaaatatgttctattttaaatataacaccggattcattttctgatggtgggcgcaactatcaggcagaccaagccatagctcacggactcgacttggtagacaagggagcggacatgttggatattggaggtgagtcgacccggcctggttccagtccagtcgacctccaagatgaaatcgaccgtattgtaccggtgatcaagggaatcagagaaaaaagtcaggttcctatttcagtagatacctaccgggctccagttgccaaagcggctattgatgctggggcggatatcatcaatgatattaccggtctaactggtgatgtagacatggccgacttgctagctcaagaaggggttaaggccattgtcatgttcaacccggttattgctcgacctgaccacccatcttcccaaaaattcagagatttcgggggccgagattttttcaccgatgaagaaagagataaaatgtcccaagcacccattgaagaggccatgatggtctactttgacaaagtcttgaacaaggcccatcaagctgggattgaccgggataagattttactggacccgggaattggctttggcctgaccaagaaggaaaattacaagttgattcacagtgttgcctcgattcatgacaagggctacccggtctttttaggagtttcccgcaaacgcttcttggtgggggaagtctccaagctaggcatcgaagccgacccagagacccaagcaggatttttaaaccgagacctggcttcagctattattacagcttacgctagccatataggggtagactatgtccgggttcattccttagatgaacacaaaatagcaaccaccattacccataatattttaaacagcgatagcttagatgatcagagctttgaccaatataaaaattaattaaaaaggagccctccccaaggaatgaggggagggctcctttgtcaataactagcacaattctaacttcctcttttatagtctgggcgacaattttagtttagaattttgttaaaatgtgtctagttttgacaatgaaaaaaattgaaaacattgatatatcaacggtttgaggcaacttgctaccctatgatataataaaaacggagaatgagggattcgaaccctcgatacgggtaatccgtatacacgctttccaagcgtgctccttcagccactcggacaattctccaaaaaataaccacaaatagtattatagctttttcttaaatacatgtcaatactagggaggaatttttaagtcagatggataagagacggagtaaaatattactagttttggggatcgtgatcttgcttttcagcctctatgtcctttcttttgatccttttgtcgcttttgtcggaattgctgtggccttggtctctttattcaatgcctaccaggcccacaagggaattaagccaaaatttatccgtaaccatgaggaaaaagaagaggaaaaactcaaggaagaaagagagcaaaacaccttctataaccggcaaagacagcgaaacctagagaaaagacaagaacaagccaaaaaacaagaagaaagggagaaagaagataagtttaacctctaataattaaggctctccttgaccgaatagtcgacttgagcttcctcaactaagttatagacaagactggtctaggtttttcccagatcaggcaaagtgataggagatacttgttctgtgagcgagagatggtgagaaataactagtaaaaggggttagcaatgtgagttatagttgaaaggcgataattactgtgtaataaggtgatttcaaagttgaaaaggataattactgtgcaataaggtactttcagattcgaaactggacaataaatccagataaggaagatttgcagttgaaactggacaataaatccaaatagggaagttttgccgcttaatggagacaaataggcagcgatatgttattttgatcgcaacccaataaacgagttatggggcaataacgcgacaattgaagagcaataaaggagttatgaggcaataacgcgacaattgaagagcaataaaggagttctgaggcaataacgcgacaatcggagagcaataaaggagttctggggcaataacgcgacaatcggagagcaataaaggagttatgaggcaataacgcgacaatcggagagcaataaaggagttctggggcaataacgcgacaatcggagagcaataaaggagttatgaggcaataacgcaacaatcttagcccaataaacgagttatagtttcgaaaaaccgctgcaagcatcagttatgattaggctcacccacagcaacagtcaaaccctttaagttcccaccttaaaatcctcactataaaaacagctagccaatttaactaaccgcttaaacataaggctggtgaaagctgtatcaaggtcaaatagtactcaaagaaaaaagcctggaattttccaggcttttccttatcttgtaggactactggccgtctgtccggtcttcttcgctagcattttcgtcgtcattacgcgggatgagttgccggaataattctctagcccggcgtgctctttcttggttttggccttcttcttgaccgccaccattacccggtctttcttggccaccttgatctggttggggtctaggtctttcttgaccttcctggcctggctgacggccctgaccattctggccttcttggttttcttgaccgtcttggccgtcctgtccctcttgaccttgaccatcatcgggatcgttttggtctggttcttcttggccttggtccggttgcggctcaggctcagtttctggttccggttcgggctctggctcaggctcttcttctggttgagcttggtctggctcttcttggacttccttcggtctcatctgtttggtcagtagcctggtcgttttcttcttggtcagtttcttcttgaccttggcttggtgcttgtctttggggttgttcatcagaaggtaagtggccttcgacaaataattcggtgattttttgagattcaggtgtagaagctgtcgcctctttggctgggttagacccgttgatgacttcgacttccttgactgaatcgggtttttcccaatctggcttgtcggaatcttcagttaaccgggtcataatttcccggtaaaaacgtcttggcagttgccgggttccgtcagcattgctgagctggttaccctcttccaagtgtttgtcgtaacccacccaaacggatagggtgtactcaggagtgtagccgacaaaccaggagtcaggaacgagaccttggtcagttgggatgttgtactcttcatgttggtcactggagtagttggaagtacccgtttttccagcttgggggaggtcagaaatgtctaggtcattactgaagaggtcaatgacccccttgagcatgtcggtgatcatataagcggtgtagtcttccatggcttggaccggttcgggtgtggtgtcaatggtctccccgtcctgggtgacaatttcggagacagtatggggttggatatactgtccaccattagcaaaggcagagaaggctccagttaattgaaggggggtcatcgatccatcaatggccgaacttggtaccaagccttctgagctagctaagctttcagggttgatatctagtctttcaagaaattctgaaacttggtcaaagtccaattcttcgttaaaaattttagcggttggaatattacgtgagttgaccagggcatcccgggtggacatttggccatggaactctcggtcccagtttctaggagaccaatctgttccaggaactgtgtaaggctcatcgaccacttgttcataagtggagcgttggttaaactcgatggctggagcgtaaacggttaagggcttgatggtagaccctatattacgtgtattttcggtagaccggttgagggacaagtggccttcaatattgcggcctcccatgattgctaggagttcccctgtggttggatcaatcagggtcatggcagtttggagctcgtcgtcgctagcaatatagtcctcattatgggccaggttgtacatgaattcttggctgtctaaatcaatattggtgtggatttttaggccagctgtataggggtcatagtcggttttttcagcaatttcgtctaggacagctgtaatatagccgtcaaggtaaagttctgcatcatctaactcttccggttggtcgaccaagtcttggtcagctgggaggtcagaagcttggtcatattcgtcctggctaatatagccttcttcatacatggcatacaaaacagtgttgcgccggtttttagcctggtcagggtttttatagggattaaagtagttgggggctttgggcataccggctagcatggctgcttcatggagttccaagtctcctacttctttgccatagtattgttcggctgctgttttcataccgtaaacattgccagccatgtggactcggttgaggtagagggttaaaatttgttctttggacaaacgtcgctcaagttggagggccagccaagcctcttgcgactttcttttgatagtttggtcctctttggatgttgaaaaaagagaaagcttgatcagttgctgggtaatggttgatccacccccaacaacttctccttccgtcacataaccaataccagcccgggcaatcccaattgggtcaacccctgggtgcttgtaaaagcgttggtcttcaatggacagaacggcttctttcagtatttcagggtattcatcagggttggcgaattctcggctgtcagctccgatggtataataaacttcaccgtcccggtccaaaagttctgaagtataggtaccaaacaaggcatcatctgttaagtcaggtgcagaagaagcatagtaggtgaagagtcccgctcctgagatgaaaaccaagaggataaagaagacaatcactaggcccacttttttggcaatgccagcccagtttatccctttacccttgcttttattctttttccggttgggtttattttgatattgactactgcgagtcgttttgttgttgtcgctcataacattctccttgtgtttattcatcaattcgatttaaaaaccttagcccgaatctattttagtcctccaaccaatattctttcctattttaaagtaatttgtcgacaatgtctataaaggggacggtaggttggtaggaaaattcaatttcatgtcctttgtcttcaaccgtctggaaagggatggatttccgaccgcccctttggtaagtaacccaagtattaaacaagtccttgccctctaagaggaaacaccggtttaaagttgaaaaatagataatgacaaagacaatgcccccttgccgctcacaagcctgcatgtggttgatttggtggtcgtgaaaattttgcaggggaaaagaggtgttgtacttggtctctttagcttcaaagtccaggtagtggcccttgtaaaccccattgtagtcagtggttgaagcccgtctaaagtaggcttcggtgattttcgcagctgagcgtttggggtagtcaacattgacaatttgaacgggggtgggctttttatggatcacagcaatctcctgctggcggtagtattcaatagaagagttgatcaactcttccagtttcatgccacggttggagtggttgcgtcgtttttgtaacttctggattggatcggtcttggatcctgtcagcttattttttgatttgggactttccggttcacgatagatttgaccattaggatagcgaataaccattttactactcctataaaataagataaactaattgtgacaggtctattttaccaaattataagccatttaaaaagaagggaaggactctgatgcgacgactctatgtgagtggctaccggtcttatgaattgggtattttcgacaaaaaagacaaaagacttttttatcttaaggaattcttaaaagaagaatttcgccggtatgctgactcgggattggaatgggtgatcacatccggtaatttaggcattgagctttgggcaggattggccctcatcgatttaaaagaagagctatcccaattaaacttggctctcttactgccttataaaggctttggaaataattggaatgatgacaaccgcaagctcttaaccaaggtggtggaaggggcggactatgtcaatttgacttcccaggatgaatacaagcatgggggccagctaaaggggaacgcccaatttatcttaaataactcagatggcctcttattagtctacgaccccgataaaaaaggcaagccagccttcttgtacgaccaggctagagcctacagccaggcgaagggctacccagtccacaccattaattttgaagaactgcaggaattcgtcatcgactaccaggaaatacataatgtcaagtaacagtttttatggtagaataacaaagaacgtgtggattttgaatgagctagaatatacttgagaggtgcaagcaatggtcaaaacagaattaacccaacgacaaatcttagagaaagatttttcatctaaattaagaggctatgacccgcaggaagtggatgaatttttagatgtcataatccgggactacaaggcttttgatgaccaggtcagtgacttagagaaccaagtcagcaagttaaaagatgagaaccaacgcttgacccaaaaaaccagcaaggtcttcaaacgctttgaagccattgtccagcaaaatgaaatcttgaaaaaccagttagctgaatacgaagaaaaaatgcgacaaggaagttctcaagctgagggcgaagacgatagtaaaacttctgaagaccaagagtcgaagcaagataagtctagtccaaaagcagaaagtagccaatctaaactacaagaaagccaagatacaaagggcaaggcggactcagagggagctgcttcggacccacaagcaacgaagaaggtggacctgccacccgcagaagaccaggacacacgggttgccaagcgaaaaagcccaaccatgagcccagttctcgggggtcgaagaaagggcagccaagaggaccaaggtcaaaaagcaagccggccgtcagctaccattatcgatattttgaaacgactttctaacctagagcgggctgtttttggagaagaaaattttaaaccaaaaaatggtgaccaagcagaataagtatggtacaatggtgggcggattgagaattttttgtggataattgcgcattagcttgactaatgtgaggaaagtccatgctcacacaagctgagatgcatgtagtgttcgtgcgtagcgaaaaaataagctacggctcctctctttagaggaagacggcaggtaaacgaactaaggccaatttggctaggttccagtagccttgaaagtgccacagagacgatatagtatggaaacatgctagtggaacgggtaaacccctcgagtgagcaactcaaacaacaggtagaggcgttctttcaacaaaaatcaatggggaaagaagtagatttacagatagataattatctcggagtattttcctaatgaatactctagacagaacatggcttacagcaaagaattcttaggataaaacccattatccattattaggaccaaagatccctccatgcttggggggatttctttattctagcgagatttatttaccggtctttccatggctgatgattgtgtcttctgctaaaatagagggaagaggaagacggaccggtggcaaaatgattgaagaaaggatagccaggtagaaatgcttgaatttattattatattgttgatcctcttaggtgtcttccagggggctaccactgcctttagcctgaaagatgaccagaagaaacaagcccaggatataaaagaggtcactgaatccttgaaatttatgggcatgactcagctagaagaccagaaaaagctagccatgcgtttttttaaaatctccacagcctatacccttttattttcgattccggccttgtggttcttgtggtttcaatcttcaatactagggattttagccagtggtctcttgttggttttagacctggtcaaaatttttggccaatacagggaaataaaaagagccaagtccctccaaaccatcctgaccacacccttagctagtaaggtattacattttgtcagaattgtagtcaaagctgttgtgattgccctcttactcggaaaggttgtgtaaaatatgacagactaccagttgcttgccacatgtgccagtggggtggaaggtctggttggggatgagctccgggatttgggctatgaagttcaagtcgaaaacggccgggtccgctaccagggcggtgaaaaagatattgcccaaaccaacctctggcttcggattgccgaccgggtaaagattattgtcggtgaatttgaggctaaggatttcgacagtctctttgaccaaaccaaggccttggcttgggaccgctttatccctcttgatggggcttttccggtttcaggtaagtctcaaaagtccaagcttcacagtgtcccagatgtccaacgtattgtcaacaaggccattgcctccaaactccaggaagtttaccataaaaggggccggatgccagaaactggtgccaagtatcccattgaagtggccctcaataaagaccaggtcctcttaaccttggatacgactggtgacagtctctttaagcggggctaccggacgggcaagggacctgcacccttaaaagaaaatctggcggcagccttgattaaactgaccacctggttccccgacaaaccctttgtggacccaacttgtggctctggaaccctaccgattgaagccgccttgatcggccataatatcgcaccaggctttaaccggtcctttctttgtgaaaactggccaagtatgccccaagaactctgggaaaaagttcgtttggaagctgaccaggctgctaattatgatattgacctggacatagctggttacgatattgaccatcgcatggtcgaaattgcccaggaaaacgccatggaagccggtctttaccacagtatttccttcaagcagatgcaggtagctgacttcacgaccgacaaaaaatttggcattatgatttccaatcccccttacggcgagcggttaggggacaaggaaaaagccaaccaactttaccgggagatgggccaggcctttagaccccatgaaacgtggagcaagtatattattaccagtgacttagattttgaagactactacggcgaaaaagccaccaagaaacggaaactctacaatggggcaatccggactgattatttccaattttggggtaagcgaacagaagatgactaatttagctaggattgtctatcaagttcaagcttgtcagtcctgtctagcaagacctttttactctagtaacaaatgttataattaacttgatctagctcaccgatcgttacttggccgattagccagagttcaagccagatagaaaggattcgaccaatgtcaaacaaagagcaaagtaaaaagaaagacgttaatcaagaaggcgggcaagggacaagacaagtaggctttactggccctaatgtttcggacaagccttcttggtccccgttctttgtctacatagccattcttttgctggcctttagcttatttttccctagtctttaccgagagtctcaacgaattatcgacctagcaggggtagaagacttgtcagcttttatggcctctctcttgaccgttatccaacccttctttttagcggtcttagcccttttagctggtcacttttttacctaccgtctaggcttaggatctgtggtttatgactactttgactcccagaaagtggcgaaggcaaagcttaaggttagcctccaaccagccttggccttgggtttactttatggcctgatgattgctagctttgacctgattttccggccttggttgcccgatattgtcagtcaaggcctccaagctccaagtttgattgatttggtcgggtctgttttttacagtggggtggtggaagaagtcatgctccgcttcggcttgatgaccctcttcttgtacattattagcttccaagccagaagggtgactaagggccgggtcatcttcactattgtttttcaaacagtactttttatgctggcctatttacccaatgtgaccacctaccttgacttgactccagtggttgtcatccggctttttgtctttgtcggcctgtctaacctcttgttttcctacctttactaccgctaccatattgaagctgcgatgattagtcatatgaccagcgttttggtatccggcctgttagctagcctattagcccttattgcctagtctgttttaggctgagaactggtcaattactttacttgaatttaacacaaagcccctggtcatcttaatatccaggggctaaaatggtttaatacagtgagtgacctagacaaaagtgggcggttaaaaaccaattgacagaagaaggagaccaaactgaatggaaaagaaaaaaatcaccatctaccaaacttcagatgtacacggctacctctatcccagtaattaccaagcccgggatgaagaccaggctttcggcctctttaaactggccagcctcttaaaagagggtagggatggatcgtccattctagtggaaaacggagactttctccaagggtctccttttagctactatatttacaagcatgaccataaagctgaccgactcatggaagcctataatgacttggactttgatctaggggtctttggcaaccatgaatttaattacggcctagactacttgaagtcagccatctcagctagtcactttcccatcctggccgctaacatcctagatgaggagggtcagccagctttgggcgaagcctatgaaattctggaaagggatggggttcaaattgccatcttgggattaacgacccaatacatcccccactttgaacacccagaccatattaaggggttgacctttgcttcagccattgagacagcccagaaatacctgcccctcttacgagaccaagccgacctggtcattgtttcctaccatgggggctttgaagttgacttaaatgaagagcttggagataaggctgcctggtccgatactggggaaaatgaaggcttagccttgctagaagcttgcggggattccattgacctctttttaaccggtcaccaacacaagctctaccaaggccaggtccaaggcaccccagtcttgatgccaggccacaaagggtcccacctggccaaggcagacctcttcttagaaaaacaagatggccagtggactttaaccgactgcaagcccaaactcctcccagtcgagtccaggacaggtgtagaccaagatttggcaggcaagtttcaggaagttaaccaggaagtggaagattggttggacactgacttgggttacgatagcaataacaatcttaatattgaagatgtccaccaggctaggttagagggccacccatatatcgagttcatcaaccgggtccaaatgtatttcagccaggccccaatttcggctagctccttctttaacaatgatgtcaagggctttaaagagcaaattaccatgcgggatattgtcagcaactacatttatcccaacaccttagccgttgtcaaaattaccggtcaggacttgaaggctgcccttgagcaaactgctgaatactatgacttagatgaagcgggacatttagtcatcaatgaagcatggttaaagcccaagccgcaagtctataactatgatatctaccaaggaattgactatactttagatatacaaaaagacaagggacagcgagtgaccaaacttgaattccagggtcagtacatccagcctgaccaagagttagaacttgttttaaaccagtaccgggctgtgggcgggggagactaccatatgttcggcagccaaaaaattgtccgagaagtaacccgtcccatgactgagttgattgcagaatacatcgaaaaatttggccccctaaagattcctcaaccaagtaattttaaggtgacttattgaaaggtgtaagccaagtcatgcccagcggggtttcctgtcaagcaaaagataacggctatctctgttagccttaggctagttgcttcaactcttggacaaaggcttggtaggccttgacatgaatatcggcgaaatagattgtgtctagtaggtgtaagttttcccatagtgtttttgctgacgtttttgggggacagaacctgttttgatggcattgtggatggtttgcggacagcgcccgagcagcttggcaatctgctgattggcatagccttctgccttataggcttcgattttatgaatttcggctagggtcaagtgtgttcctttggggaagtgtgttatcataggcttgagtcatgtgaattctccttatattcattggttttgtcgacgactaatataataggaattcacatgactttttatatgcaagtggctaacttgattttacaatccacctttgattactctagaaaaaaatatctattttttgtataaaaatattgactctttatttttttatgttatattatcttcaataaaaaaggagtgacattatgatgattaatattgataaagagaagaagattattaagattggctttggtgctgaagaaaaagaagatcatattcaaagatggacatttatccaaatttacaaacctactaaaacaaatttcataagtaaacttccgaaagaacacgataatatttttgagatggcttttaatgcacgatagatttatcttattaaaaaagagggtaagaaagatcgttttaattttcttacccctttttttaaaaacaaaaaatgataattatattaaagcgaattcagaattgattttctttgttatcttttcaaaaactactgatgtagaaattatcaatgttatagataagtttctagatcaatttaaagaaatgtcaatggaaacagatccgaggaacctttcaacttatttgctaactgaaatttataagcaagtaaatactggcatttcgaattttgaagaatattcgttttgcattaagggtatcgataattttgattttacaaaaaaagaaatatcgtgttatttatcaatattaaccaataaagttgataataatattgatcaatactttgatgatgagcaattagagttgcttagaacaacgataccaacagtagatgatatatattattttacacacgatatattctatttaacttatctaaatagcaaacaagaatattttagtatgttgagttcttataagagggaaattataaatgaatttatttattcatgtatagttttttgtatgatcagcaataacatggatttattgggcgaattgctaattagttatagtttagtgaacggaaaaattagcaaagctaattcattgatcaatatgggtttgaattatattgaacaatatgtagatgaagtcgaatcaaatttgatacttactgaatcgttttttttacaatcataccatactattttagtgatactgattcttgctttaattaatgaataaggatatattctatgtcaaaagaatttaatactgagtcttttaaattatacaaatacaaagaaattgaaagcagaatactaagttttgatattgaaagaaaagtaatttttatatatttttttaagaaaaatggtattttgacgaaatcaatgcaaattgaactagagtccagttattataaggtactatcaataaatgaagatattataaaaatttcccctaataaatatggagaattaattgctcatgtcctgatgaatactatttgtaatagttattctccaaatgttgctgatcttagattacttaatggtatgtttatctatgcttgtcagaagaaaagaccgatactaattattctgttatcgttgatattgcaaaattatgatggactttttaaatttaataatttaaaatatggaataaaatttgaagatgaattactaaatgtttttaggctattaaatattgaaccattacatagttatgaagaaaataaaatagataacataaagaatgagtatataaaattcccaaaaatgagagagattgaggcatctgaaatgaaaaattgtaagtttaacgacgaaaatcaaatgactaaaaaagaaaaaattgtagaaatggaagagactttaattgaattagaagaacaattgattgaattagaggaattagaaatcgaaaggttcgaatgccgtgttgagtagcaaatacctttttagagataaaaaagaagtttgataattgataacgatagaagtaggttgagcatggttcacaattatacaaaggaatttttccgcaacaataaaataaatgtcctcttcactgtacttgtatatataacgaatgctggggttaatattggtgtgtcatggtacatacaaatcatcatggacctgatggccggagattctaactacagctttgtcatggttgttcagctggttttcattctctttttaatcttaatcatttcatcaacgacatcttactttacctatcctttatttttgcagagggccatggttcagtataaggaaaaagctttcaagcaattgttgaagaaaaatatatcctcttttgcaaatgaaagtactgctacctatatttcagcttacaccaatgatgccatcagcatcgaagataattatttgaagacaatttttgaactgattcaaatggtgatcatgttttttggatcattagctttaatgctagcttatagtggaagattaacactagttgcagtattactatcggtacttcctcttttggcttctatccttactgggaatacattagcaaggaaagaagagaatgtttcaaatcaaaatgaaaaatatgttgctagcattaaggatgttctaagtggcttctcaattgttaaaagtttccaagcagaaagagaaattggccacttattcaatgcaaatattgctcgattagaggatgctaaatattcgcgtaaccaagccatggtatttattcaaagtattggcaatcttgctcaaatcattgctcaattgggggttatgttagcaggtgcttggatggtactaaaccagctagccggattgacaccgggcatggttatggcatttacaaacctaatgaactttgtaatgcaaccgcttgccttgatcccacaacttctcgcccaacgaaaagccgggcaagctttgatcaaaaaattagctaagaatttagaccaccatgttagcgatgagggcttagatcttggtgtggttactaatccaccagacttaagacttgatcaggtcaactatgcttacgaagaagggaagctagctttaaaaaatatttcatataaatttgagtcgaaaaaatcttacgccattgttggtgggtcaggatctggcaagtctacattattaaacttgctcatgattaatgatagtgactataatggaaatatttatataggaaaagataatatcaaggatattttaaaatcatcattgtattccttccttacccaaatacagcaaaatgttttcatctttaacgccagtttaagagaaaatattaccatgtttaaatccttccctaatcagcaagttgaaagggttatcgaaatgtccggcttgtctcaacttatccaggagcgtggggatgactttcttgcaggtgaaaatgggaataaactttccggaggtgaaaagcaacgcattgctattgccagagccttattaaaagatagccaagtcctcttggtagatgaagccactagtgctttggataatcaaacggcacagcaaattaacaaagtcattttggacttaaaagagattactagaattgtggtaacccaccgtttagactcaaatattttacgtcaatatgatgaaatcttggttttaaaagatggtgaactaatcgagcatgggaagttcgatgacctaatggcagacaagcaatacttttattcactatacatggtcgcaaattaagtatgggagctggtcttgccattccataatattccgtcctgctaggcttaacttagcaggactttttaattgacatcactgtttgctttacttgccactggagaaagtttattgttagagtaatgaaatccaataggttaggggatgggtgtatgacaagtttaaaagatattgcaaaaattgctggagttgccaaaagtactgtttctagatacttaaaccagggccaggttagtgaaaaaacgaaagagaaaattcgtcaagctatcgaagagacgggttaccggccaaataatttggctaggtctttgaagtcacaatcctccaaattaatcggagttgtcattcctcgttttgattctggagctaccagctcagttttaaagggcttagaccaggcagcttttcagtcaggttatcaattgctaattattaattcaaatttagaccgaaaaagggaagctgaaaaccttaaaattttggccaacaaaaaagtagcgggaattattttattagccagccatctttctccacaactcattcaacaaatagaccagctgccattacctattatcgtcctggggcaaaaagcagaccaattatcttatatctgccatgacgactaccaagctggctataaagtggctagccaccttgcggacttaaactatcaaaatattttttacattggagtttcttctaaagacccagctgtggggatagatcgcaagaaaggttttcttgaaagttgtaaccattatggccaaagggttaaagtcattcaatcaaatttttctaaggaagataattataagttagctcaaaaattactcaaagataatttgccagcaacttatatcgcctgtgcaaccgaccacatggccattgcatttttaaaagcagctcaagaattaaattatgtcataccggaccagctagccatctccggttttggcgggtacaatgattttgactactactatcctggtctaacaacggtcaagtatccctaccaagaaagtggaactctagcctttcacagtttactggacctgatctcaggtcaaagcagtcaggttcagactgtcttagacaaccaactccttatcagggaaagcacgcaagtcaaataaaagccatcatcgactgcccaagtcattagtcctttgcgtgaaaaatcacccgagttaaaggtagacgattaagaaagggctttatttctttggacacttgtgctaaactaaaaaaggaaccggttccagtacataagttattaggaggttatgggaatggctaaaggttcaaatgaacaaatcgtaagtgaattactagaagcagttggtggtcctgaaaatatcaaaaattatgagcattgtgccactcggatgcggattgtcctaaaagatgacaacaagctagaccaagacaaggcagatagtgtgaccgatgttaagggttacttttttaacacaggtcaacaccagtttatttttgggactggaaaggtaaatgaagtttacaagtctttcgatcattatattggtaaatcaaatacggcttctggtcaagcgcatgctgaaagcgacaatacatatcagaacttatctctgcttcaaagactggtaagagtttttgcagatattttagtacccctaataccagctttagtcacaacgggtttattaatgggattaagagggcttctagttgaactcggtctagacatgactccagagatggaagaggcttttgttatcttaactgacactgcctttgcctttttgcctgttttaattgcctacagtgctacgcgtaagtttgacggaaatccggtcttaggtatcttagttggcttgatgatggtcgcaccccaactccccaatgcctatgaagtggcggagggggctagtcaacctctaactgtttttggaattgatttagttggttaccaagggtctatttttccctctattattgccggctggttgattggtaaattagaagcttggctcagacgttgggtccctgagataatggatttaattgtgacaccttttctaaccatcttggttactgttggtcttattttcttcttggttggccctatcattcaagtcctcgaatctgcagtcatcaatggtattgtttcaattattaatgcaccatttgggctgggctacctggtcttttctgctctgcaacaattaatcgtcattacaggtcttcaccattcttttagtattatagaactcaacttgctctcttccaccggcttcaatatgatccaacccctgacaagtgtcagtatggcagggcaatttggtgcagcgatcggcatggctgttttagtgaaggataaggtcaagcggtccaatatgatctctgccagcctccccagtctattcggtataactgaacccctcttatttggagtcaacatgcggtcggtccgggtctttgcatctggcatgttagccggtggactagggggcttactcatttctttctttgacctagccgctcctggcatgggaattacttttattcctggtttattgctgtattctggtgatttttctgctatgctacaatatgtccttgttattttactatcttttagctttggtatcctattcgtttacctgcaaaaaaataaaattcatcacgtttaaacaggaggatgattgagcgatggcagaggcaaaccatgattttgaccaatggcggcaagcttaccacttgatgccgaagcggggttggctgaacgatcccaatggcgccgtttatttcaaggggacctaccatgtctaccaccaatatgttcccgataaccccaaaggtggggcaacccactgggggcacaagacctccaaggacctggttcactttaaagaagaacccgtcttcttgtcaccaggcaagtgctttgacaaggacggggtctattcaggtggtgccatgaagttgggggaccaaatccatttcttctataccggcaatgtcaaaaaagaaggggattatgactacctttacaatggtcgcgaccagaatgttgtccacgtggtcagctcagacggctacagcattgaccaaagacatgtcgtcatcccccatgaagatttccctcccggttttaccaatcatataagagaccccaaagtcttccagcatggcaatttattttacatgatcttaggggggcggaagttggataatacgggtgctatcctcctatttgaatcagaagacttggaccattgggactacaagggcaacttgcttgaaggcaatgaagaccaaggctatatgtgggaagccccggacttggttgaatttggcgaccaggcagtcttgcttttttcacctcaggggattagagccaaccacaacagttttttaaacccccattcagctggctacctagtcgggcggatggactgggacagtctccagtttattcccaagggtcccatcaaggaattagaccaaggctttgacttctatgcccctcatacctttgatgatggccaccggactattatgtgggcctggatgggagtttctgacagctcaccagaatatatttatcccaccgtaaaccggggttggcaacactgtttgaccatgccccgtcttttagaactcaagggggaccgcttgcttcagaagcccttgcaagaatacgagaatatccggactaaccggctggaaattcagaacactaaaaaaattgcctacggggacattgtgggccatagctatgaatttgaccttgactttgtcgaccagccaagccacttcactcttgacctcctagaagatacccgcttagcttataaagaagggacattaactttgaatcatggtccatccggttacggcagacgaagccgtcagttagaccttgattcaatcagccacttgcaaatatttgttgaccattcttccctggaaatttttgtcaaccatggggaagcggtcttttctagccgggtattccccaggcacaaaagaaaataaaatggtctttgattcggatacagccgctaacctcctttattgggtccttgaactcagtgaatggtggggcaagtaggtcaactagtcgggttaaagatcctttccagaaaaaagcttcctgctagattttgacactttatttttgagctttattggcggattaatatagacactttttcggggcaactgttaaagttgctctttttttaatgaattagatggaaagaaagactgtataggttagtgcccatgcttcggtaagcgtaggtcggtttctttttgctggtgaaagacgacaatagtcatccatatttaaagctggaattgagtataagtataaggtttgttattcttaagcaataactgtagtttaagaatcgtcaattattttctcaaacaattggcgttatttgagaattttcggcggtttttctcaaacaaaaaatgttattcgagaatccggccactttttctcaaacaacagatgttatacgagaatttcaatgatctaggtctttcaagtccaaaacactacaatcgcctgccattaagaaaattaggatgttgaaagggatgcgctactgcagtaaaaagtcacgaccaattttgacagaaaaaaacagctaccggtttgggtagctgtttaaaaaataaggctagtgaaagcttcaacacatgctgtataaaggtgatttcattgataaagcattgggtattttttagctttcactgtcaaaagacttgtctttaatgtcttggtaagaatcttggttcttgttcaagtcttccaagtagtggatggcttctgaagcgatcccgatatcagcctggaaggtaatcaggtcattggctttaataatggtattagctttagggataaattcccggtggtcacggttaatcttggtgatgtgggaaggggctggcatgttgaggtctctaaccaccatattgtctagtcggctattggattcaactatcagttcactttcagagatagatcctttcaaggctgagtaaggaagtttgattttccgcattaagagaacttcgtaaatagggtccgattttaaaagtcgtgcggtagagaagctcaataaacagacaatggcaaggggcatgatatgggtgactgattcagttaattctagcaagaggaccacggaggtaagagtggcattggtgactgaggtcaaaagtcccgccatggcatagaccataaagttcatgattaagaattgttccacagataggtagttgtgcaaggcagtcccaaaaacggctccgactaaggctcctagagtaagggttggcaggaagaaaccaccaggtgccccggctccgtaagaagcttggataaagacaaaacgcaagaagcagatcagagcgatagctcctagggtgtaccaaccatcttgaatttcaaaaataaggttagttccgtcacctaataggttaggggcaaataaaccaaatggaataacaaccagaaaggagaatatggggattaagtagttgggaatagggagtttgcggtaccaactaggtactcttaagaaaacttcttggaagatgaaaccggcaattcccattatgattcctaaaataactaggtaaatgtactggtcaagagggaattcagccaagacatccaggtcaataatcggcttaaccccaaagacattgtaggaaacaaagttaccggctacagatgcagtcaaggtgaccaagaagagactttcagagaacttgtggtagacttcttcgataattaataagacggcagcaaccggggtgttaaaggcagcagctaaacctgcactggccccagctgataggaggaggttttcatctgcccggcttcggcccaagaaagaatcaacgccgaggcctaccacgctcccgatttggatggaagggccttcacggccgaccgccatagcagatcccagggaaataaccccaccaatgaattttttgattaaaaccgatagccagtccatcttaaagaggccttgaatgtggccttggatgttttggaccgacccttggatgtccggttccgagttgatgagccaaataataatgccccccaagaagatactgaacaagatccaaaatataagccagatagggttgtcagtagatctgagaaaggcatagatatcttcggtataagatataagaaagttagctgaaatccggaataagctgataatgataccggataggacgccgactattattcctaagataatatatctaatctttccaatacggttgtccataacttttaaaactcctatttatgtaatttttcaaaacttttcatagataataccatacatcttaatttgaatgaacacttttggcttaaaattcataaagttttttacaaataggagttagtcgcaaggaggtttccaaagagtctccctttagccgactgccgcaataatcaagttaaggacctggggcaaaaagaccaggaggatggtggcaataggttggcaggcagcataaaagggaacgaccaggtcggtttgggagctttccattaaggcccctagggaaggtgctgaagtcatggccccggtcgtcgtccctaaagccccataaacagggagtttaaagatcaggtaagccagggcgaaacccaggagagaggtgaccaaggtcatgatcattcccataatgaagatttggagtccgtagtcacctaagatatccacaattccttgtccagcattgattccagagtcactgaggaataaggaaatgcctaggctggagaagacatttaaaatatcgttgggaatttcaatattaatctgaccgattcgcttaaagtggccagccaaaagccctactatcaagggtcctcctgagttgcccaggctgaattgactcccaccaggtaaggggacttctaaactccctaagatcatccccaagaggagggtggtgaagaatacaaataagccatttttgtcaatttgcttgaagccagctaggctaggagcccccgtggaatttttagggggtcttaacttgtcgatttcttcttcctggttgacccccattagcttgggcatgacttggaccaagctaacgatgcctacaacaccaaaaatataggtgatcccatagccaataactgccaattggcccgctccagcttcctgggcggtggcaagggcggtggtggaagtcatggctccagataaaattcccatcactaggtccttgtcaatccctgtcatgtagtaaaaaaggagggagaggattcctgataagctaatcacaaagagggcaataaggaggaagcttagtccattggtttttaaaaaatacagaatgttcttgcctgccttcagaccgacagccccgataaacatgaccaagccgagagtccccaccatatccggaatttgggctccaaaatggccgaaaacaataccaactaagatgatggcagaattaccgaacttgatcccgaaaatatcaatcgacccaattaggtaacctaaaccaataattaaaaataaataggctaaagggttcatttaaacccgcccccttactaaaattgtagtaaaactactatatcgtttttaaaacgataatacaacaaaaataaacctagttcgttcaagagattaagtctgggtcattgaagggcttttatttatgctataatagacgggaagtttaaatgaaattttaatcaataggggtgtcccagatgagaatggttgatttaatcgaaaagaaaagagacggtcaggccttaagccaggatgaaatcacctggatggttgaccaatacagcaaggaccaaattaaagactatcaaatgtctgccatgctgatggccatctactttcaagggatgagccacgaggaagccggttacctaactatgtctatggtggaatcaggggaccaaatcgacctgtcccagatcgacgggatcaaagtggacaagcactcaaccggtggagtgggtgacactactaccctcatcctagcccccttggttgccagcttaggtgttccagtggctaaaatgtccggacgggggcttggccataccggaggaaccatagacaagctggaatctatccccggttttcatattgagctgaccagtgaggaatttgtcaaccaggtcaaccagcataaaatcgcccttgtcggccaatccggcaacttaaccccggcagacaagaagctatatgccttaagagatgtgaccgccaccgtcaatgccattcccttgattgcctcttccatcatgtccaagaagattgcagctggcaatgatgccattgttttggatgttaaagtggggtcaggagcttttatgaaagatgaccaggctggagaagacctagcccggaccatggtcaaaatcgggcggtcagtgggccggcaaacgatggctcttgtctccgacatgtctcagcctttaggacgagctattggcaatgccttagaggtgaaagaagccattgatgttttaaaagggaaggggccagaagatttaagagaattagttttggccttggggagccaaatgctggttttggcaaagcaagctaaggacttaaaccaaggcaagcaaaaacttctccaagccattcaatctggtcaggccctagcgaagtttaaagaacttcttgaaatacaaggcggcaacagccaggtggtggaagactccgacctcctgccccaagcaaaataccaaattgacctccctgccttggagagtggctacatctccagcatggtggctgacaagataggccaggcctccatggtcttaggagcaggtcgcaagaagctagatgaccaaattaatccagcggtcggtctaatcctccataaaaagattggagacccagttgaaaaaggcgagccccttttaaccatccacagtgaccaagtccgggtggaagaggtcaaggccctcttatacgacagtatccgtatttccagccaggcccaaaagccgcagcttatccaccaaataatcggttcataagtttgacagtttgatggaaactagtcctaggtattgacttcagtccatggaagggagactaaaatgaccagtgtttacattattgccaacccctcttctggccagggcaaggccatccaagctattgctgaactgctcaagttgtttcatgaagagggcttgggtcccttggtcaaattgacccaagaagagtctgatattgcagaatatgcccaaaaagcctgccaggcaaaggttgacctggtggttttggttggtggcgatgggacgatttctcattttatgacggctgtccaagactatgactataaaccagtggtcggcatagtgcctacagggaccatgaacaatatggcccggtccttgaatatcgaccaaaatcccaaaaaggcctgtaagcaagtgttacagaaccaagcacaggccatcgacatgggcttaatcaatggccaagtctttacctcaaccatttctgctggatctgtcccagcctcggccagggaagtcagccaggaagacaaggagcagtacggggcactggcttatatcatcaacggtctccaatcttttagtcaggggcaagatgagtgctacaaggtccttttggatggagttgaagtccagctcaatattgacctcttggtgattggggtggctaattctattgcaggttacactgactttttcaaatcggctacctacaccgatggactcctccatctctttatcctgaaagaagctcccgttgcagaaaaaatttttgccttttccaagctattagcagagccggaccaggcccaagacttgagtcaatttgctcagggtgctgacgtcaactcctatatgacatctttcaaagatatcaagatcgacctcttagacaagggaggccaagtgaccatggatggcaatcccggtccaagctttcccatccacgttgaagtgatcccccaatttatccaggtaattgtgggtgactaggtcagtaaaatttctgaattctatccctcctgcttgttgcgggagggtttttctgttgcttgtcaaagcctattgaattccttaacggcaataaattatgacttcctatatatttatggctttggctagtgctataataggacttgtagaaagtggtggaaaaatgcgtcgtaaattaatccgtcgttttgaaaaactggtctttatactagaaatgatcattgttgcctttatcgtgatcggcatcattatcggcatgaccgactttgtttattattttagggaccttatctctgccgaaaccaattcctatgaactgtttgaggcctttttagcttattccttgatcttaattgttggtattgagcttattttaatgctcttataccattcaacccgagctattttagaactgatcctctttgtgattgcccggaaaatgctggtttactcccacaccatgctggacttagttttaggaactttggccatcttgatggtttttgctattttgcgttacttactacccaatgaagccgagcacgacatcgttcgcaaggtagaaaaaacctacctccctaatgtcaaaatggcggatatttttgaggattgggatgaatcctatgactacccacttgatatgaccgtggctgattacatattagaccaaagcaaggaactgggccaaaaagtggaagttacaactgcagttggatataaggacaagcatattgaagttttagaactggatgaagagggcaatatcagccgggtttctgtttactaggatactgagactaaggattttattggcttaggctaagttgagccaatgttcaaattataacaaaacagggatgacttttgactaagattcctagtagatagcctagttatgactagataggtctcggttaatgagctggtcggcatagacttttcagcctttgtttttgcaagagatgtgaaattattcattagttatattataatataggtgaggttaaatatttagaaaagaaggtatagtatggatatcaagcaattgagatattttatagaagtagctgaaaccaagaatttatcccgggctgctgaaaacctgaatatttctcaacctaccttgtccctgtcgatgaaaaaaatagagcacgatttaaacgttgacttatttgataaaaaagcccggtatgtcctgaccaagcctggtgaaatcctgtatagaagaggtttgaccattgtcaaagacttcgacgatttaatccgggaagtatccaattatgatgaaaaaatcaataaatcctttaaactgggtgttaccatgctttttgccgttatttttatgaaggaaatctcggcctttatcaccaagcacccctccattaatttaaatatagtccagggtgggtcactttccttgcaagaaaaactcctagatgacgatattgatgtgggtattttgtcctaccccaactattaccccaatgaaattgaaatccaaaccgtcaagacagcctgcaaagaataccaggtttcggtcgtcatgtcagagtctcatccactggcccaaaaagaccggctccgcttccaagatttgaaagactatgagttctcaagctttagtgaccactttactgttggcaactttttaaaaaaccggagtaaggagctcggctttaaagctaagatcgtctttaccaatgatgacttatacgctattttggaccatattgccagcaaaaaatccctctgccttttgcctcaaggttaccaaaagtgggtagatgatcctaacttaaaatggattccgttagatgatgattccaaccatttttcagttggtgtagctcggagccgcaagcatgctgattcagaaattttagatgactttatcaaagaaatgactggccaagcccaactcatcaagtaataaaatataaaaatgattattatttcaagggtgtaatcagaaaaataattaccgatatagaataatggttttaaataagcaatttagtttttaaagcaataaaagattatttttggcattttttgtttatttctgcccttaaaagtggttttttcccctattaagtaagcctatgcttaagttatagtaaacttttgataataattcatcttttccagtcatttaacttgtttatctgcttgatctacattataatgattatagattaaatgaaacgaaaacatttgatctaaaatcttataggaggaattattttatgtcagacaatgtaaaagaaatactcaaccaagttgtggcaacccagggacttctttacaccaaacttcaccaataccactggtatgttaaaggtcctcaattcttctccctacacgaagaatacgaagatctttacaaaaaaacagctgaagactttgatgaagtagcagaacgtttgcttattattggtggccatccatacgctaccctcaaagagtttattgacaactctatcatcgaagaaaacactgcaaacactaaacttggtgaagaagaaacagtccgtgcttcagtgaaagacttgaaagcttacactgacttgcttgataaagctgtcaaattaactgatgaagaaggcgacgatgtatccaacgacttgttaattgctgtgaaaacagacgttgacgaagctatttggatgctacaagctttcttaggcaacgaagcgacagaccaagttaactaattggtccgatttaaactgaatagctaaaagaaaaagctaccctctttgggtagctttttgtgtttatacatggcttaatcttcattgtgtctaggcatggcctaatcagccaggtcttcaatcaaagccttggtgatacaggtgacccagtgtcgtctgccttcagggtttaggtggatgtcgtcggtatctaaaatatcctggtcgatgttttggtagtaggaaaaccaatcgatcacgtggacctggtcaaattcttctgccttattttgaagcatggtattgacggaatcccgccaaggccggttgacatgggtattgacaaagtagagctctgcatctgggccaaagttttcgataaactggttaaactggtcattggtaaaattcccgttcgatcctaaagcaatgacgactaatggactgagcaggccctggtctttgagcgaagcgataaggggagtggaattatataattgtcggcccacttcagcattgacataagaggaagggtagacggtattgagaccggctgacgcccccaacataatggaatcgccgataaagcttgcctggaggttgatggtttggctaagctcatccttgctaaggtactcagtgtagaaggcctggtcttcatttaagttatcgatataatcgtctacatcaaattcttcttggttttcttgtggattttctccttcattttctgaactttcagggtcttggtcttgttctgaactttcctggtcttggttttgctcactttgggcctgtcccaagtcttggttacttttagtggactgggcatattcttctttgtaacgttgggcttcgtcgttagaagtcgagaagaggaaggaaagcaaggtagtagtcagtaagagggcttgcaggccagctaagactttttgcttggagggaagttggttgaggtaggactggaatctgtctttaatattaccgggcaagtgtaggagcttggaccagcttggccaagtgagccacttgctagtggtggcaaagtcagttaagagtcctaggataaaaatgatgataacttggccggtcatattttgcagccagcccggtaggtcgtaagctaatcgctgggataaaataaagatggggtaataccacaagtaaacgccaagcgagtgttggcctaagaaggccaggggtttaaaggtcaaaaggcgggagaagaggccatacttactggctagactgacaatcaaactgacaaagaccaggtcaaataggaccatgccaccataataggtaaaagttcccacattggtcatttcaaaaagcatagcaagcagggccccaaacaaggctatttggaccagctgcccgtatttttggaagagcttggtctggtttatctggtcgagggatagttggctggcaataaggccaatcccaaaggaaaagaaccgggtgtcagacccatagtaaactcgggttgggtcactgccaggttggaagttgaaggccatcaaaagagcactgatcagggttagtgtcgttattaggaggataaagttttgccggtttttaatgaaggggcgaaagatctttaacaatagccaaaagaagaggataaactggacgtagaggcttaagtaccaaaagtgggtcaagacagaaggttggataatttcatcaaagtaagaagctccttggataatctgaacccagttgttgacaaagaggaggctagaagcaatttgggaaaaccaattggtcaggaggtcttggtaaaaaactagtaaaaaagtggcgatcaacccgataaacaagagtaagggcttatagagtttagctaggagccttttgagcttttgccagaagggaaaggaagtatactcctggttaaagaccttgttaatctgggaaccgttgaggtaaccggccgagacaaggaagatattaactcccaaaaaccctccccggtagatgtgggggacaaagtgatagaagataataaagatcaaggccaagagtcttaaactgtcaagttgtgcaaatcgtttcttcattgtaaatcttctctctaattgacatgattatgtatctttttgagcctttctgagggcctgcttggctaggttgtctgctcccttgttttgactttcggggacccagtcaaaggtaatcagctggaagttttcccttaaggctaaaatactttccagatatttctgataggcttcatttttggacccttcattgtgaataacttgggtaagcgctttactatcacaagcaacaaagaccatctggctggttaagtcatggtcaaccaaccaattcagggcataaatcaaggcttggaattccgccgtgtggttatttgggctagtttccaaggggatggctatttgctcatggaagccgggaccggtgatgacaatccctaagccagcttttttattttttggattataggctgcatctgtgttaacccgaatcatccatcaatctccttaaacgcaaactattatactatagatgctagcagaaaaacattgatctactatcattttaaaagaaatataaagcaaacttaagaaagaatttaggaaaaacagtgaagattgtctcacaagtggggctagcttgatagtcaagccttctcttaatatgttaaacttaggtgactatgtatagaaagtgtgacagcagtgaaagagtttaaagtcatgaacttaagccaatccattggaagcaagaccttgtttaaggacatcaacctctccattaaagaccaagaccgatatggcttgattgggatcaatggggtcggcaagtccagctttctaaataccctggtaggggacttggcctttgatgcaggagaaatcaaaaaggctaaggactataccatttcctatcttaagcaaagaccttctttagatccggaccagactgttctgcaggtggtttaccagggggacaacaaggtgatgaacactgttcgtcagtatgaagaggccttggccaaactcaaccaagacccattgaaggaaagttaccaaaaggactttgaacaagcagaagctgccatgaaccgagaagatgcttggaatgctaattctaaagccaattccatcttgaccaagttgggcattgaagatatggatgaaacaatcggtaacctgtcaggtggtcaagaaaaaagggtggccctagcccaggtcttgattcaagaatcggaccttttgattttagatgagccgaccaaccacctagactaccaaatgatcgattggttgtctaaatacctcagcaattaccctggggccattctcttggtgacccacgatcgctactttttggatgaagtggcgaatgcgattattgaactggaagaccaaactctctacacctaccccggcaactaccaggcctatgtccaacagaaagcagaaagagaggctttagaagccagccaagcacataaaaacaaacagttatataagaaagaactggcctggatgagggaaggagtccaagcaagggggaccaagcaacaagcccggattaaccgctttgaagaattaaaagagggcgttaaaggccaatctgaggaagaaagtctagagcttaatttggatagtgtccggattggtaaaaaggttcttgagtttgaccaagcctcctaccagataggagggcaaaaaatcctggatgattttgacctgattatccaaaatgccgaccgtattggggtgacaggggccaatggggcgggtaagtcaaccttcctcaacctcctcacccaacgactagacttggatagcggtagcctagaccagggagagacggtccgaatagcttactatacccaacaaaatgaaggcttggatgacagtaaacgggtgattgactatatgcgggagacagcagaggaggtctacctggctgaccaatccaaggttagtgtggcccaattattggagcggttcatgttcccccggtccaagcaggccacctatatttctagtttatctggtggggaaaaacgccggctttacttgatccagcttttgatgcaaagacccaatgttttggttttagacgagccaactaatgacttagacattaagaccttaactatcttggaggattatattgataactttgtgggtgcagtaattactgtttcccacgatcgctacttcctagacaaggtagccgacaagttactagtctttaagggtcaaggggagattgaaacgtattacgggtccatgacctcctaccttgaccggcaaaaacaagcccaaaaagaccaggctaaagacacggacaagtccaaaaaaagtaaagataagcctcaaactagtagtctaagcaaggagaaaactcggcttaactaccatgaacaaaaagaatgggataaaattgaagacgagattagcgctttagaggatcagttggaagccattgaagaggaaatgcttgagcaagccagtgattatggtaaactgaatgagttaaataaccaaaaagagaaccttgaacaagaactagacgaaaaattagaacgttgggaatatttaagccaatatgtataggagagataactatgatagcctacgtttgggcccaagatgagcaaggaatcattggtaaagacaaggttttgccttgggaattgtccaatgacttaaagcattttaaaaaagttacagaaggtcacaccatcctgatgggccggaagacctttgaaggaatggataaaaagcccctccctaaccgaaaaaccttggtattgacccgccaagatgactaccaagctggggacgaccaggttgaagtcgtccactccaaagaccaggccttgacttatgcgtcaggtcatggggtggacctctatgtgattggtggggccggcattttcgacttgtttctggaccaagttgatgttctccaccaaacagttatccacgagagctttgatggtgacaccaccatgccagacattgactgggacagctttaatcaggtgtctaaagcttattatgaccaggctgacggtcacaaccactcccacaccatttatgaatacagaagaaaataagaccaaaggaccggctcgttttgtaatgaactgccggttcttttttgattttgctggtgtaatgggatcactactttttgagttaaaaatggacaatcggattgtgaatgagtggattttcagcacccagatgttattatagaattccagcaattatttctcaaacaacaaatattatacgagaattttaaaagatggtaatatttcagcctaaagttccaccattgccaacccataaaaagctatgaaatctacagccacacccatatttaatcgggtcttcagtttgagataaaaaccagctagcggtctaatcttgctggttaaaaataaccttggtggatgatccaccaaggtcaaatggtttaaaagcgtatttcagtaaaaatagttaaatgtaatggtagatagaaataaacatacaagtggttcctagcatgacaaagaggtgccaaactacatgcataaatttaactttctttagttggtaaaagagggttccaaccgtaaaggctactccaccggcaaccagccaagcaattcctcgccagcccatcccttgaaagaggtggtagattaaaaatagggagatccaacccatgccgatatagagccaggttgacaggttggtgaagcggttgaaccaaaatgttttatacaagacaccaaacaaggcaatcaaccatatgatagcagtggcaatggcccccacccaaccaccaatgacgacaaccgtgtaaggcgtataacttcctgcaatcaagacaaagatggtggcatggtctaaacgttgcatgacttccctaattttcgtgaacttgaatatatggtaaaaggtagagcttaagtaaagcaggattaaagatgctccgtagacgctgtaggccactaattgggccatgctgtctcggccaattgccttgtatataaggaaaatcaggcccacaatacttaagatagcagcaagtccgtgagtggaagcattcagtatttcgttcacaatgaggtatcgttttgatacattccgtcctttttccagtttgactccctccgattctggtataatatggtaagttaatcataacagaaaaagctagctaggaaaagtgctttgctgaaaagaaagggaaattgagatgacagatgaagaaaaaagaagccaggccaagcctaagaaagcttcctcaaatatttggaaaattttattctttgccttgttagtgatcaccttgttccccttggttttctttttctttgggccttcaggaaaccaagggccaagtgagttagaccgatcgctagatccaggagacttggcgattgacctggccctaacttttgaggacgttgaaagtatggctaacagctttatccaagccaaccaaccagaccaagacctggatttaaggcttagccttgaccaggacttggaactggctggccagacatcttacttaggctttgacctgccctttcaatctagcctatcgcctcaagtcacggacaatgggaacgtggtctttcaagttgataacctgaccttaagagggtttgacctgcccaagtccttagtactaggcctccttgacagccaaattgacctgcctgactttatagcctttattcctagccaaggccaaattgccatcaatctaacagactttcaactggataacggagggcagttgagagttgcggactgggaccaggctaaccggatcttgacagtcacgattattttaccgacagaggtccttggtccagataacaatagcgattaagtctgcttttatgataaaataagggcaagatcctgcctatcacgaggccaaggggaggatggataaaattatgcgtgaatctttctaccattatatgcgtcaattacgggaccccaaccgcaatgatgaactgacccagctagcctatgccattagtgaagacggcatgttccctaaaacctctactgattacgatgatattagccggtatttggaactagaagtaaattacgtacctaggatggacctttttgacaaggcctgggctaaatatcttgaagacaaggctgaccaagactaacttctaaagacttgggaatgaaaacaataaatcgactcaaatataaaaaggagaaatgagatgcctacaccacatttagaagccaagccaggtgacattgctgaaattgttctactaccgggagatccactgcgggccaagtatatcgctgacacttttttacaggatgtgacccaatataattccgtccgtaatgccttggggtttaccggaacctataagggacttaaaatttcagtccagggaactggtatgggcatgccttctgctatgatttacacagaagaactcgtgcgagaatacggggctaaagtcttaatccggattggatcagctggtggaatgaaagaagatgttcaaattcgcgatgtcgtcttaggccaagctgccacaacagacgccagtctccaccgcaatattttccacaaccaggtcgactatgctcccatcgcagactttggcctcttaaaaactgcttatgaagtgggtgaggaaagaggctttccgatcaaggtagggaacatcttgtcttctgaccgtttttacaatgatgagcttgacatgaaaaaattagctgattacggggtcatggctgtagaaatggaagcggctggtatttactcagtagcggccaaacacaaggtaaagaccttaaccattctaactatctctgaccacatcttaactggagaagagaccagctcagaagaaagacagactagtttcgaagacatgatggttgttgccttggaaacggccttgcaaacggaactttagatatgcctgtttgttataagagctggacctgtccactttttttgaactacttaagggaaaggcagtctagttttggagaccgattgtaaattcaaccattaaaaggtcacataaacttcgctgtaaagttaatgcttgctattcttaaaaaccagggcttatgttatactattcttattctcttagctaaaagctaaagaagaagtattaaaagaatcctattttaagagaaagaaggaggtttgacggtgtctgatcaaaataacagaaatggcgtatcttttttgacttatatcttgtctttgctcgccatttttatcatcggagtctttttgacccttgtcttaactggtcgaactcgtcaacccaatctgatgtcttcttcttcaagcgaccaagctgaagaagaaaacatctctttggatactgtagcagaactttaccaggttttaacccaagagtattatggggatgtcgactcgaaggccttaattaatggggcactggaaggcatggcccaagctgtggatgaccctcatacccagtacatggatgtccaagagacatctgactttaacgatgaaatttctggatcttttgaagggatcggggccgaagttatcaaggaagacgaaaaacttcgggtggtttctcccataccggattcgccggctgaccaagctgggatcttgcctaacgactacatacttgcagttgacggccagtccctaaaagacttgaatgcccaggaggccgttgaattaattcggggtccaaaagggagtgaagtcgacttagaagttgaacgttcaggcaacagctttaacctgaccgttgagcgggatgccgttcccattgaaacggtgacttaccaagaagtagaaggtcatgacggtataggtctcgtccaactttcccggtttaaccagcctagctatgaagaaatggtagaagccatccaagacctagaagaccaaggtgtcacccaatttatctttgacttacgggggaacccaggtggactgctagataccgccttacaaatcgccaatatctttgttgatgaaggcgaccctattatgcaagttaaggaagctgaagacgaagaccctatcagctttgtagcaggggatgagtatggtgactttaaatttaacccagaccatgaagccatcttcctagtcgatgaaggttcggcttctgcttcagaaatcctagcaggggctgtccaagaagctggctatcctcttttaggtaaaacaacttatggcaaggggaccgtccagtccctctaccccttaattggtggttctgaagtgaaatttactaaccacatttggttgaccgcttcaggtgagtggatcaatgaagaaggaattgagccagacattgaagttgaccagctgggccaaggggagcttaaattggtcaaccccgaagagacctaccagttaggtgaccaatctcctgaagtagaaaacatcaacaagctcttgtcacttttgggttatgaggtgccggacaatgatcagtttaatcaagaaacccaagtggctgtccaaaccttccaaaatgaccagggcttagaagagaccggtgtgatgaatgaaacaacctccatccggctcatggaagccatccgtgaatatataagggaaaatgacaagcaggtggaagaagctattgctaggctagaagcagacaatggcgagtagaaagttggtgaatcttccttgactaaagatcaatcgcagccagaattggaccaaagaggagaccagggcggggaaggccaaacttcttggttttcagaaattgtctctaccctcctttatattcttatttttacgggaatcttcttcttgattcagcaatttctttttgtcgttgtgagtgtggatggccagtccatgtacccaaccttggaaaacaacgaccggctcgtcttaaataaggtccggtccatcgaccgttttgatattgttgtttttcccgccccagatgacccagaccaccaatacatcaagcgggtgattggagtgccaggagacaagatcgaatatatcgaagatgacctctacctcaacggagagcaagtggaagaaccatatttggaccattttgatggtgaggcaaacttcgcttcttatataactggtaatttcagtctggaatccctctttggggttgaaacagtgccagaaggtcaatactttgttttaggggacaaccggcttaattccagggatagtcgaacctttggctttgtcgatgccgataacataacaggagaaaccaggctacaaatatggcccctaagtgactttggttatgtcgattagcaagagtcagtcttagtagtaaaaagaaagcaaacatcattaaggcctagaccggtgtctgggcctttttattcagaaaggagccgatccatgtcaaccatccaatggtatccgggacatatggccaaggccaagcgggaatttcaggaaaaattgaagttagttgatatcgtcttagaactgcttgatgctaggctaccggagtccagttcgaaccctatgttggaccaaatcatccaggacaagccccggcttaaaattttaatgaaagcagacttggccgaccaaaagcgaaccaaccagtggctcaactactatcaggaccagggcaagccagccatggccttgaacgttaagcacaagcaggatatgaaagatgttaccgaccagatcaaggtggtcttgtcagactggcagaaacaaaggcaagcgaagggccttaaccagcgggcagtcaaagcagtcagtgtcggtatccccaatgtgggcaagtccactttgataaaccgttttgcgggcaaaaatattgcccagactgggaaccggccaggtgttacccaggcccagcaatggattaagtataagggggtcttggaactcttagacacacccggtattctctggcccaagtttgaagaccaagaagttggcaaaaagttagccctaactggggctatcaaggacaaactcttatatatggatgacattgccctctatgctattgacttctttaaagcccactatcctggccggtttgaagaccgctaccaattggctcaaggggctgaaaaagacctttcttcggttgaccttctcttggccattacgggaaaaagaggatttggcgatgactacgaccgggctgccacaatgatcgtcaacgaaattcgcaagggactcctgggaccctttagcctagaccagttaggagactgaaaaagtatggaaaagcttaccattaaagatatcaaggccaaactaagacagcttgaccatgaaaataactttaccgaaagcctccgtcaagacccgcgcaagggagttcaaaaggctttgaaatcttggggccaatcccggttgagagagaaagaattaatccaggcctaccaggaaaaaaatgccttggaaagtgagcttcgttcccaaggttttcagaccattgccggtttcgatgaggtgggacgggggcccctagccggtccggtggtagcagcagctgttatcttagaccctgaccaggtgatcttaggcttggatgactctaaaaagttatcccagaaaaaaagacaggaactggaccaagctatcaaggccaagtcaaaagactgggctattgggtcagcttccgttcaagagattgaccgatacaatatctaccaggccacccgcttggccatgaaacgtgcccttgatgccttgttgcttaaacctgactacctcctggtagatgacatggtcattgagacgtcacttccccaaaaatccatggtcaagggggataaactcagtaacgcaatagcagccgccagtattgtggccaaacaataccgggaccagcagatgatcgactacagcaaggactacccggactatggcttcgaccatcatgtaggctacggcacccaaatccacctggaagccttgcggaagtatgggcccacccccatccaccgacagtccttccaacctgtccgagatgccagccggagtgactaggcaggcctgacccggggtgactttagtaaaaacagcaaaataatgagcttgcttaacctgacccagtcctttaaagaaactggatcaggctcttcttttggactagggcctaggtctttcaatggattgaatctaatggggataaagggatgaatcaaggtccattagttaaaaacttttagctaaaataattaaatttagctttttttgcgtatataagggtagaagctttttgaggtgagaaaatgaaaaatacttggaccttagaccattatctgattttactagctgaatgttcttttttgaccccgaccgacaaatgggccttgcttggctcggtctatcccgaccttattgctgaattggacttgccttggttggctaagatccgactgaactccgaaaaagcaaggcggtttagccactttattgctattagtggccgggatattatcaattcttatgatttagacccagtggaccggcttactttttttgacccaaactatcccgatcctttgcggcacatttatgccccgcccctccttttatattataagggggacttaacattgctggaccggacaattttaggggtggtgggtccaaggaggccaagtgattatagcttggccggtataaaaaaactcttgcctggcttaattcaaaaagacctggtgataagctctggcctagctatgggggtggatgcctgggcccaccaagctgctatctattttggtgggtctaccatagctgtagtggcgacgggcttggacttggcttatccagctagtaaccgcaagctgcaagatctgatcagccaaaagcacctggtcatcagtgaatacccctatggctgccgggctcaaaagtggcactttccagaacgtaaccggattattgctggcataagccggggagtcttggtcacagaagctaggaagcagagtgggactttaattacggcccagcttgctttagaggagggccgggatgtttttgcactaccgggccggattgacagcccactttcagaaggatgtaaccttttaattagtcagggggctcggccagtcacccatcaagaggatatcctaaaagactggtcattataaaaaataagtataagtagttgacaaatgacagtggcttagcctattatgataagcgcaattaagttagccttgaaaggagcccgacatttggcctataaatacttggtgatcgtggaatcaccagcaaaagcgaagacaattgaaaaatatttgggtcgcaattataaggttgtggccagcaaaggacatattcgtgacctgcccaaaagtcgcatggcggtagactttgaagataactacaagccagaatacatcactatccggggtaagggaccggtgatccaagatttgaagaagcaagccaagaaagctgaaaaagtttacctagctgccgacccggaccgggagggggaagccattgcctggcacctatcttatgtcttgaagcttgaccaggatgataaaaaccgggtagtcttcaatgaaattactaaagatgcggtaaaagatgcctttaagtcgccccgaaccttggacaaggacctgattgattcccagcaagcacgccgggttttggaccggattgtcggttaccaaatcagccctttattatggaagaaagtcaaacgaggtctgagtgcgggccgggtccagtccgtcgccttaaagatgatttgcgaccgtgaagaagaaatccgccagttcaaaccggaagaatattggacacttgatggtaaatttaaaaagtcccggtctaagtttgatgctaaatttttccgcttggacaataagaaaaaagacctgcccaacaaggaggcagtcgatcaggtcatccagcgactggaccaagatcaggactttgatgtggtaaaagtggacaagagccagagacggaaaaatccccaggccccctttaccacttccagtttgcaacaagaagcagccaaccgactcaacttccggaccggcaagaccatgatggtcgcccagcaattgtatgaagggattaagataggacgtggcgctgccactggtttaattacctacatgcgtaccgactccaaacgtatttcagacttggctaaggctgaagcagccaacttcatccatgatgaatacggttcaaaatacgcttcccgcaagaaggctccagcaaagaatgccagcggagcccaagatgcccacgaggctatccgcccgaccagtgctatgcggaagccggaagacatcgaaaaatatttgtccaaggaccagtataagttgtataacttgatttggtcccgttttatagctagccaaatgaaaccagctgtctatgacaccatgaaggttgacctggtccaaaacggagtaaccttcagagccaatgggtctaaaattaaattccagggttaccaaaaggtttaccgggatacttccaagcaaaaagataacctcctgccagacctcaaggaaggggatgcggtcaagttagataagcttagtccagaccaacacttcacccaaccgccagcccgctatagcgaggcgaccttaatcaagacattggaggaaaacggagtgggtcgcccttcgacttatgctccaaccttagggaccatccaaaaacgctattatgttactttgaccaacaagcggtttgaaccaactgaactcggtgaaatcgtcaatgacatcgtagtagaattcttccccgatatcgtggatgttaactttacagccgagcttgaagaagacttggacaaggtggaagaaggtaagaaagaatgggtcaaggtgatcgaccaattctatcaagagtttaaagatgatgtcagcaaggctgaagaagaaatggaagaagtcgagattgaagacgaaccagctggctttaaatgtgataagtgcgggggcgaaatggtgattaaaatgggtcgctacggcaaattttatgcctgttctaatttcccagactgccgcaacaccaagcctattttgaaaaaagtcggcaccacctgtcccaaatgtaaggacggagaggtagtggaacggaagtccaagaagaaccgtaagttctatggctgtgaaaactaccctgactgcgactttgtctcttgggacaagcccttgcctcggtcgtgtcctaaatgcgacgagtttttggtggaaaaacggacccggtccaaggtccaagtccagtgttccaattgtgattatgtagaagaagcccagtaatatttaatgtgatcaaaaaagaccagaagcctagcaaggctttctggtcttttttttatgtgcgcccggcatgggtgacaacttggtggtgaaagtccactgcaggcctggcagtaggaactgttagctgaaggcaagggtgtccatcgtgaggtggaatctgaaggaagctggaggcaaacactcgcactgacgaacagaaacttcatatcaaggctgatttgagatggatgagcttgcataacaaagtaaagtccaatactgcacaagtccctttcagtaaatgaagcagtgacatgagtggaaggttgtcacaccttactcggggaggtctcactagcgtttagtagtaataacgaatagtgagaagtcagccgaggtcatagtagctacgttgtagcgaaggactgaacaatattcatacaaagtatagaacggaggttaaagtttacgaataggacagaaaacaatcgaagagattggcaatcggtggagagaataggtggaaccgaaagggtaagccgatgcgtctagtaaactttaggtgaaatgacagaaatgtatcgtaagtctccaaacttaatggagcaagttgttgacagaagaaacttggaaacagcagccaaagccgttaaacggaacaaaggcgctgcaggtattgacggtatgaccgtttttgagatagaggagcacattcaagcgtattatcaacccttacggaagaaattacttgatggaacgtataagcctcaaccagttaaacgagtagaaataccaaagccgaatggagaaaaacgaaagttaggtataccttgtgtgcgggatagagttgttcaacaagccatacggcaagtaattgaaccgattatagacccgcacttctatgacaacagtcacggattccgaccagggaaaagcacgcacagtgctctcaagcaatgtgcacagtattataaagaaggctatcgtgttgtagttgattgtgacctcaaacaatgctttgacacgctcaatcacgacaaacttatctattatcttgaacagtacatccaagataaaatgatactgaaaattatccgtaagtttttgagagcgggtgtaattgatttgactagcgaatttatcgcaagtgaaacaggggcaccacaaggtggtgttctatcaccgcttttgagtaatgtgtacttacatgaactggataaagagttggttaaccgtggtcaccgatttgtccgatacgcagatgactttgtcatctacgttaaatcaaaacgagccggtgaacgggtaatgaacagcatcacacgctttattgaaaaagacttaaagttaatcgtcaatcaagacaaaagccaggttgggtctcctacccgtttaaagtttttgagctgtctgatgaagcaagtgaatggggattatcgttttatccctaccaaagaagccaagcagaaattcaaacgcagattgagaaagctgaccagtcgtaaacggccaggtacttttaaaaagataatgactgaaattaatcgagtcacccgcggttggattaattactttggtttaggcttcattaaaagctttatcaaagaagttgagcaatggttaaatcaccgtatcagacagctgattcttaaacggtggaaacgtccacgaactattataccaaagttggaacaatatggactggacttagattcagccaaacggattgcgtattcacgcaaaaagtactggcgactgtcatgcacacatgaatttcatcgtgcaataacaacagaaagactcagcaagtggggcttagttccactaagcactatcgctgagtctgcttacgcaagatattgaaccgccgtgtacggaaccgtacgcacggtggtgtgagaggtcgactagccaattaatggctagtctcctactcgattctataatttttgacctaagtggtttaataaaggttattattctcaaacttagggtcaagtttaagatcttttggccagttttctcaaataacatctattatatgagaatcccacttaacttttctcaaacaacaaatattatttgagaatttttatcccgtagtcaagcctaaaatttcacaatcattagctaaaaaagtcatggaaaggtaggtgacaatgggtcaacctataaaagcgttactggaccagagggcaaacaccactagcccagtaaaaggggatgagcttgaaaagctgtgaaggtcattaaaggatgggctaagctcagtaaagccaagtctccatttttaacaaatctcaaccgcaaattaaaggcttaaaactgaccatgatgaaacccgcaccaaggtcaaaaggtatagagagctttcttttggtcaggcgtttatatgagaaagacaacttataatttaaatttattttagaaaactaaatcaatagggttgataatgagataaaaattttgtagtattaatcaaaagctaatttaaagatgagttttggaaggagatcaagatgaaaaagagccaaaagatcatcgaaaaggataaaaagtattttgcagaagccggccgggtaccctattacccctttgtggtggaccatgccaaggggtcgcggattacggatgtcgatggcaaggagtatattgacctcttgtcttcagcctcagccttaaacctaggccaccgaccccaaaaggtagtggacgctatcattgaccagacccaacgctttatccactacacacctggttacagccaccataagcctttaacggagttagcggagcggttagccaagttgacccctggagactttgctaaaaaagtttcctttggcttgtcagggtcagatgccagtgatggtctgatcaagtttgcccgggcctatacaggacggcaaaacattatcacttttgaaaattcctaccatgggtctacttacggagcgatttctttatcagccatatctttaaatatgagacggaagattggtcccttcttacccggcgtctaccatattccctttcctgacaattaccgggggatgtacgggcaaaaagaccccctaagtgcagaagactatctagctcccttaaagtccatgcttcatagctatctgccaggtgaagaagtggcagccgttgtggtcgaaaccctacaaggagatggaggcttattggagcctgtccccggttacttcgaaaagttatatgatatttgccaggaatatggcattttattctgtgtagatgatgtccagcaaggtttaggacggactgggaaatggtcctcgatcgaacactttaatgtggttccagacctggtgacttatggcaagtccttggcgggaggtttgcccttatcagccattgtcggccgggctgaaattatggatagtctagggtcaattggccatgtctttacaaccggtgccaacccagtttgttgccaggcagccctagctgtcctagacaccatggaggaagaagataccctacaagctagcctagataagggggaccaggccagggctagaatggcgacctggcttgaagactacgactttgttggcgatgtccggggcctcggcctgtcgattgggattgaaattgtcaaagatcaagaccaaaaagaaagagaccctcaagcagctttgaaaataaccaaccggtgttatgaaaagggtgttttgattataaccctagccggcaatgttttgcgcttccagccacccctaaacattagccaggaagacctggaccaggctttaacgattatcgaagagtctttggctgactaccaggctggattattggatggctatgatgtcagtggccagggttggtcataaaaacaggaaaaggaggaaagaatatggaggaagtcaccagacaagaccaggttaaaggtcaagcatcgtcttcggccaaggtgagctatagccaggtagtcaagctggctggagccatgatcacagcgataatcgggtctggcttttcaagtggggaggaaattctgcagtttttctcggtttacggcatccggggcatgatttcagccttgctggtcctagtggtcttagccatcacctcaggccttatcatgcagtatggctttagccatcccagcaacccgcctaagactgtctttaaatactatgtgggcaaggtttttggaagtttcttaaatatctacatcccaattttggccttcttgattggggtagtgactgtttcaggggctggtgctgctattaaccagtactttggcctggccaacttttgggggactgctttgataacgatcattgttctcctagcagtcttacttggctttgaccgcttaatcaatgttttaggggcacttggccccattactttgattgcctcgattgggattggcctttacacactgctgaccaatttcagtgccctccaagtttcagaggcttacttgcaagtcgccaaccagtacacagatgtgccttacggggcagggaacggtatgggattctggtggttggccggtattctctttatcagttacaccatgatgggggccattccttttatttcccagctagggactagaggcgggaccaaaaaggaaagtttcctcggcggtgttcttggtggcgttggtttgatggtgaccgccatcttccttaacttggccatgttgacagatattgaacaggtcttaaatgttgaagtccccgttctttacttggcccaggccatcagcccagtggtgggcggaattttcatttatgtcctcttgcaggagatgtttaccacttcttgtgcctttctatggactgtgtctgatgccatcaccaagaagtcagcctcctctagggtcaagaaatggattattgtcttgatttctctagccaccctggccggagcccaacttccctttagaaccttggttaatattgtctacccgatttcgggttatatcgggattatcttcctggtggccctctttgccaaggaagcttaccggttagcacagtccaaaaaagcttaagtgaaaaagaaaactgctggagtcactgccagcagttttcactttatgtgcgcccggcatgggtgacaacttggtggtgaaagtccactgcaggcctggcagtaggaactgttagctgaaggcaagggtgtccatcgtgaggtggaatctgaaggaagctggaggcaaacactcgcactgacgaacagaaacttcatatcaaggctgatttgggatggatgagcttgcataacaaagtaaagtccaatactgcacaagtccctttcagtaaatgaagcagtgacatgagtggaaggttgtcacaccttactcggggaggtctcactagcgtttagtagtaacaacgaatagtgagaagtcagccgaggtcatagtagctacgttgtagcgaaggactgaacaatattcatacaaagtatagaacggaggttaaagtttacgaataggacagaaaacaatcgaagagattggcaatcggtggagagaataggtggaaccgaaagggtaagccgatgcgtctagtaaactttaggtgaaatgacagaaatgtatcgtaagtctccaaacttaatggagcaagttgttgacagaagaaacttggaaacagcagccaaagccgttaaacggaacaaaggcgctgcaggtattgacggtatgaccgtttttgagatagaggagcacattcaagcgtattatcaacccttacggaagaaattacttgatggaacgtataagcctcaaccagttaaacgagtagaaataccaaagccgaatggagaaaaacgaaagttaggtataccttgtgtgcgggatagagttgttcaacaagccatacggcaagtaattgaaccgattatagacccgcacttctatgacaacagtcacggattccgaccagggaaaagcacgcacagtgctctcaagcaatgtgcacagtattataaagaaggttatcgtgttgtagttgattgtgacctcaaacaatgctttgacacgctcaatcacgacaaacttatctattatcttgaacagtacatccaagataaaatgatactgaaaattatccgtaagtttttgagagcgggtgtaattgatttgactagcgaatttatcgcaagtgaaacaggggcaccacaaggtggtgttctatcaccgcttttgagtaatgtgtacttacatgaactggataaagagttggttaaccgtggtcaccgatttgtccgatacgcagatgactttgtcatctacgttaaatcaaaacgagccggtgaacgggtaatgaacagcatcacacgctttattgaaaaagacttaaagttaatcgtcaatcaagacaaaagccaggttgggtctcctacccgtttaaagtttttgagctgtctgatgaagcaagtgaatggggattatcgttttatccctaccaaagaagccaagcagaaattcaaacgcagattgagaaagctgaccagtcgtaaacggccaggtacttttaaaaagataatgactgaaattaatcgagtcacccgcggttggattaattactttggtttaggcttcattaaaagctttatcaaagaagttgagcaatggttaaatcaccgtatcagacagctgattcttaaacggtggaaacgtccacgaactattataccaaagttggaacaatatggactggacttagattcagccaaacggattgcgtattcacgcaaaaagtactggcgactgtcatgcacacatgaatttcatcgtgcaataacaacagaaagactcagcaagtggggcttagttccactaagcactatcgctgagtctgcttacgcaagatattgaaccgccgtgtacggaaccgtacgcacggtggtgtgagaggtcgactagccaattaatggctagtctcctactcgattttcagacttttgacccatgcctggtcttaaattatctgtatcattgtaaatatgttacaatatgtttggtaaagggtgagtgtcatgagccaagactatgtgactttatttgcagattatttaatatatgaaagacagtactccagcttaaccaaggaggcctacctggaagacattaaggacttccaccacttcttaaaccaatcaggatccagtgatttactccaagtccaacctagcgatgccagactttacctggcctatttgacggaaaaccactacagcaaggctagtatttcccggaagttatccagtaaccgggccttttaccaatttttgctccaaaatgacctagttgagaccaacccctttgcttacttaaatgtcagaaaacaagggatccgcttgccccagttcttttacgaggaagaaatggaggccctctttgaggcggttgaaggccaagatgatttgacaatacgcaaccgggccctcttggaacttttgtatgcaacgggtatccggctaagcgaatgccagcaaattcggctcaaggatattgactttgacttgtccatcctgtttgttaaggggaaagggaacaaagagcggtatgttccatttggctattatgcaaacctggccctcaaggattatatcgaccaagcccgaccaagcttgatggccaaaagtcaagcggaccatgactatctgtttgtcaatcgcttggggaaccatatcacgaatgaagggattgcctatatcctcaaccaggtggtcaaaaagtccagcctagccagtgatatccacccccacatgcttcgccatacctttgctacccacctattaaaccaaggggcagatatgcggacggtccaagagctcttgggccaccagagtctgtcttccacccagatttacgctcatgtcaccaaggaccatttgcaaagagcctacaagcaatttcacccacgatcataaaataattgacggaggaatcatatgacaaccatacttgcaatccaacacgacggccagtctgctatgtctggcgacggccaagttaccttaggcgaacaggtcatgatgaagggcaaggcccaaaaagtcagacgggtctacaatgaccaagtcttagtcggctttgctgggggagtagcggatgcttttaccctggaagaaaaattcgtcggctacctcaacaaacactcaggcaatctgcagcggtcagctgttgaactagcccgggagtggcggtcagacaaggccatgaaaaacttagaagccctcttaattgtcatggacaaggatgacttgcttctggtctccggtaacggcgaagtgatctcgcctgatgacgggattttagccatcgggtcagggggcaactttgccttgtctgctgcccgcatgctcaaaaaacacgctggtgacaagttgtcagctgctgacatttcgactgaggctttacacgccgctgctgatatctgtgtttacaccaaccacaatgtgattactgaaagtattgaaggaggaaaagagtgaaagccaagctagacttatcacccagagagattgttgaccgcctgaaccaatacatcattggccaggatgaggccaaaaaatcggtggccatcgccctaagaaaccgctaccgaagattgcaattagatagcgacatgcaaaaagaaataacccctaaaaacatcctgatgattgggcccactggggtagggaagaccgaaattgctagaaggttagccgatattgtcaacgctccctttgtaaaaatagaagcaactaagtttaccgaagtgggctatgtcgggcgagacgttgaatccatggtccgggacctaatcgagcgtgctgtccgcctagtgcgggaagaaaaacggcaagaagtccggcctgaagcccggcaagcagccatcaagcgggtagccaaggctctggctcctggcaagcgcaaaaaccacaaccaagccaacaatccctttgcttccatgatgaacagcatgggggtggacacagaagccttgaaccggtttaaccaagaagctgaagaggaagaagaagtctcagaagaagttgcttctaaaagacgagacattgttgaccaaatcaaacgaggggttatcgaccagaaggaagtagacatcaaggtcgaagagaaaaaacaaacccctaattccccaatgacccagcaattcgagcaattagggcttgatttttcggataccctagggtcactcacccccaacaaaaaggtcaagcggacagttaccgtagaacaggctgtggatatttttactgaagaagaggcagacaagttgattaactccgaagatattcatgctgaagccgttcaattggcagagaataatggcttgatctttatcgatgagattgacaagatcacctcgaccaatgattcccaaggcagtggccaagtttcccgagaaggagtccaaagagatatcctccctatcgtagaggggtcagcggttcggaccaagtacgggacggttcacaccgaccacatcctctttattgggtctggggcctttcacttgtccaagcctagtgacttgattccagaactccaaggccggttccctatccgggtagaactcaatgatcttaccgcccaagactttgtttccatcttaacggaacccaataatgccttggtggaacagtacaaggccctcttggggactgagaatattgaggttatctttaccatggatgccatcgaaaaaattgccgatattgcctttagggtcaacgaaaatactgataatatcggagcccgccgcctgcacactatcttagaaaaacttctagaagacctcttatttgaagcctctgatatgaatattggccaggtgaagatcactgagcaatatgtggaagataaaattggccacatcgctggtgaccaagacttgagccagtacattctttaagcttcattgaggtaagcttaaacttgggctgactacacttgcctagctatcttgccaggcaagcactccctgatctaatctttaaaaagacccctgctccttagctgttagctaggaagcaggggtctggtgtatcttatttgccttgttttttactggaatttaagccaaaaggaacatggctttctgttccatttttgattcggacaatattgtccttgtggcggtaaaggacgaagaggaacaagaagcctacagcgatggtaaagaccaggtcgtccaggaggaagctgaagacaaaggctgacccaatggccaccatggaagccaggctgaccatgctagagatgaagagggtggcaaagaaaatccctaacatggacaggaggtaaatggggtacatggcaaaagccaccccgcaggaagtggcaactgccttgccccccttaaacctgttgaagatggaaaaggcatggcctaaaatagctgccaggccataaaaaatggggtggaaggcaggttggaagacggaaaaagctaagtaagccggcagataacctttaaaggcatccaggaaaaaggtaatgaggcctggtgcaacgcccaagactcgaaagacattggtagtcccagtgtttccgctgccgtgttggctaatatcagtatggtaaaatagttttcccagccagtaaccgcttgggatggacccagacaggtaggccaagaataaacccagtaatgaaatcaacatatatagtctcctcattattgattggactcacatcattttcaatagtttaccataattcaagggggctttaaatataatcttattataagcccttatatcttgctaaaaggaagggattataagacaatggcactaatccaatagaacaagttttcgctaaactgactatctgtggtatgataaagtttgtcagtttgagacaaggagtgaagagatttgacgaaggaatcttacaatgattcatctataaccatactcaagggcttagacgccgttaagaaaagaccaggcatgtatatcgggtcaaccgatgccaggggtttgcaccacctggtttatgaaattaccgataatgctattgatgaggttttggctggctacgctgatgaaattgaagtcaagatccacacggacggctcggtttcggtcaaagacaatggacggggcatgccaaccgggatgcatgagtcaggcctacccaccatccaggttatctttaccgtcctccatgccgggggaaaatttggccaagagggggcctacaagtcagccggtggactccatggggttggggcctcggtcgtcaacgccttgtctgattggctcacggtgatagtgaccaaggacggctatgaataccggcaagactttagccaaggaggccaggctaaaggaggcatccagaagagaaaaattaaccagcaaaaatccagcaccctggtccacttcaaaccctcaggccaagtcttttcgaccaccgaatttaactttaacaccatctgtgagcggatgcgggagtcggccttccttgtcaaagggaccaagattaccgtagaggacctgcgccaggaagaaagccaggtcttccaatttaatgaaggaattaaggcctttgtcgactacttaaatgagggcaaggataccttgagtccagtaacctattttgaaggttctgaagatgaaattgaagttgaatttgccttccaatacaatgacggctattcggagacggttctgagttttgtcaacaatgtccgtacccgggatgggggcagccacgaaactggagctaagtcagctattaccaaggctttcaacgactatgctaggaaaagtggcttactcaaagagaaagacagtaacttggaaggatctgacgtccgggaagggattgcggttgttttatccgtccgtatcccagaagagattctccaatttgaaggccagaccaagagcaagttaggaactcctcaagcccggaccgccactgaccaggttatctcagaatccttaacttacttcctggccgaaaatggggacttgtctaagcaacttattcgcaaggccatccgagcccggtctgccagggaagcagctcgcaaggccaaggaccagtcccggaactctgcttccaagaaaaaagttgaaactctcctgtctggtaagttgaccccagctcaaagcaagaacgcccagaaaaatgaactttacttagtggagggggattcggctggtgggtcagccaagcaaggtagggaccggaaattccaagcaattttgcccctgcgtggaaaggttatcaacacagaaaaatcttctttggatgatattttaaaaaatgaagaaatttctaccatgatttataccatcggtgcaggtgctgggcctgagtttgatattgaagctgttaattacgataagatagtcattatgactgatgccgacacagacggcgcccacatccaggtccttctcctcaccttcttttaccggtacatgaaacccctgattgaagcagggaaggtctatattgccctaccgcccttgtataagttgaccaaaaagcaaggaaagcaagaaaaaacagcctatgcttggactgatgaggagttggaagacctggttaaagattttggcaaacactacactctccagcgctacaagggtttaggcgagatgaatgctgaccagttgtgggagaccaccatggacccagagaccagaaccttgatccgggtcaccattgaagacagtgaaaaggctgaaagacgggtttccaccttgatggggaccaaggtggatcctagacggaagtggattgaagaccatattgaattcagtctggcagaagatggcagtattttagagaacaaggtcctagaaggagaggccaagtaagtctggaccagcaattggtcgagaaaccaggtcctttaggcgagtctatcttacctaaaccagctaagtcgcaagctagccatcgctagacttttacccacaaaataagaagtaaggagtaaattatggcaggagaccaagagaccagtaaaatacaagaattaaccttagaagatgtcatgggggaccggttcggccggtattccaagtacattatacaggaaagggccctaccggacttgcgggacggtttaaaaccggtccaaagacggatcctctatgccatgcaccaggacaaaaacacctatgacaaggcttaccggaagtcggccaagacggtgggaaatgtcatagggaactaccacccccatggcgacacatccgtttacgatgccatggttaggctcagtcagccttggaagatgcgccatcctttggttgatatgcacgggaacaaggggagcatggacggggacccaccagctgccatgcggtacaccgaagcccgtctgtctaaaattgcttccgacctcctggctgatattgataaggagacggtggaccatgtcttaaactttgatgacacgaccgaggagcccaccgtcttacccgcccgttttcccaacctcttggtcaatggggctagcgggatttcagccggttatgctactgacataccgccccataatttgagcgaggtgattgatgccaccatccacttaatcaaccaccccaatgcaaggctggagactttgatggactatattcaaggaccagactttccgactggggggattatccaaggtaaaagtggcctgaagaaagcctaccaaacgggcaagggaaaaattatcatccgggccaaagcagatattgaggccatccggggtggcaaatcccaaattgtcatcagtcaaattccttatgaggtcaacaaggcaaggttggtccaaaaaattgacgacatccggattaacaaaaaaatcgacggcattgccgatgtccgggatgaaagtgaccggtctggcttgcggattgtggtcgaaaccaaaaaagatggtgatggggaagggatcttaacctacctgctgaaaaacaccgacctccaggtaacttataacttaaatatggtagccattgataaaaaacgaccccagcaagtctccctcaagcaaatcttatcttcttacttggaccacaagcggacagtggttcaaaaccggacccgttacctcttagccaaggccaaggaccgccagcacattgtccaaggccttatcaaggccatttcaatcctggatgacttgatccaaaccatccgggccagtgaaaacaaggccaatgccaaggaaaatattatccaggcttatggttttagccaagaccaagccgaagccattgtctccctccagctttaccgcttgaccaatacagatataaaggacttacaagcagaagccaaagacttagcccaagccatcctgacctaccaggacctcttaaccaacaaggccagcctggatgctttgatgaaagaagaattgaaagaagtcaaacaagcatatggggaggaccggctaacccaggtccaagacaagatcgaaaaactagaaatagaaacccaagtcctggtcagtgaagaagacgtcatggttaccgtcacccagggaggttacttgaagcggacctccatccggtcttacaaggcttcccaagtggaggaattgggccggcgagaagacgacttggtcatctttatgcaagagttgtcaaccctagaccaactccttattttcacctcgaaaggcaatgtggtcaaccgaccagtccatgaattaccggacatcaagtggaaggatattggagagcacttgtcaaggaccatcccccttggagaggacgaggaattgattaaggtgtacccttatcgggaattagatgccggcaagcgctatgtctttatcactcgagatggctatatcaaacaaagtccagagacggaatttgagcccaaacgaacttacaagtctcgggcttcaactgccattaaattaaaatcagaccaagatagactccaggcagtctactatattcctgaccaagaagattacgatgtattcctagccagctacaagggctacgggctcaagtatggactagaagaagtgtcagaagtaggggcccaggctgcaggcgtcaagtccatgaacctgaaagagggggaccatgtccaagatggtttggtctttaagcgtaagcagttccaagaagccttgttcattacccagcgagccagtgttaagaaaatggccctccatgactttgaccggacttcacgggccaagcggggtttacaaatcctcagagaactgaagcgaaacccccaccgaatccagtttatgatcggaatttcacaaaataaattcctggtcaatctcctaactgatacaaaaaaactagtacagataaacccagatgactatacagtttcaaaccgccataacaatgggtcttttgtcctggacacaagccgagatggcaagcctgtttcttactatttaagtgataacgattctcacttgtaagaggtttacaaagtggaatagctaaaaaaactctgttcaaatggaacagagtttttttgtgtttcatttaacatataccttgtcttttgacatgattgtgatataatgaatttgaaataaggaaataggaggctaaaccatgcaaatgccaaacattgatactgaaaaatattggagcggatttacccaaggcaattggagtcagacagtcgatgtgagagactttatccaaaagaactacaaaccttatgatggcgatgagtctttcttagaaggtccaactcctgcaactgaccaactctggaaacaagtcatggacttgaatgagaaagaataccaagctggtggtgtcttggacttagacactaaaacaccttcaaccattacttctcacggtccaggctacctcaatgaagacttagaagaagttgtcggcttccaaactgacaaacctttcaaacggtccttccaaccctttggcgggatccggatggcagaacaagctgctgaatcatacggctacgaaattgatcctgaaatgtccaaaatattccgtgactatcgtaaaacccacaatgatggggtatacagtgcttatactaaagaaatgaaagcagcccgccacagtggggttattactggtttgccggatgcttatggtcggggccggattattggtgactaccgtcgtgttgccttgtacggggttgattacctcattgaagacaagaaagaagtctttgaaaattacggcgacggcaaaatgactgaagaagtcatccgccaacgggaagagctattcgaccaaatcaatgcgcttaaagagttaaaagaactgggccacatttacggctttgacatttccaaacctgcccgcaacgctaaggaagccttccaatggttgtacttggcatacttggcagctattaaacaacaaaacggggcagctatgtcctttggtcgtacttcaaccttcctagacatctatgtggaacgggaccttgaaaatggtactttaactgaaaaagaagcccaagagttagtggaccacctggttatgaaattacgtctggttaaatttgcccgtaccccagaatacaatgaattgttctcaggcgacccaacttgggtaactgaatccattgcgggtatcggcaaagacggccgccatatggtcactaaaaactcctaccgcttcctccacaccttaagtaaccttggcccagcccctgaaccaaacttaactgtcctttggtcagaaaaattacctcaaaacttcaaagaattctgtgccaaggtttccatcgcaagtagtgcagtccaatacgaaaacgatgaaatcatgcgaccatactttggtgacgactatggtattgcttgctgcgtttctgctatggaaattgggaagcaaatgcaattcttcggtgctcgtgccaacctagccaaggctctcttgtacgctattaacggcggggtagacgaagtaaccaaagaccaagttggccctaaatatgaacccatcacttcagaatacttggactatgatgaagtggtcgaaaaatatgaccaaatgactgaatggttggctgggctttacatcaacaccttgaatgttatccactacatgcacgacaagtattcctacgaaagcttggaaatggctcttcacgacactgaagtcttgcgaaccatggcaacaggtattgctggtttctctgtcgcagctgattccctctcagctattaagtatgctgacgttaaagtgatccgggatgaagatggtttagcagtcgactttgaaattgaaggcgactaccctaaatatgggaacaatgacgaacgagttgactctatcgcagttaacttgctggaaaaattcatggaaaaagttacccactatgacacttaccgaaactccaaacacaccacttccatcctcactattacttctaacgtggtttacggtaagaaaactggtaacactccagatggtcgtcgttacggtgacccatttgcaccaggtgctaacccactccacggcagagacagcaatggggctttagcatccttgaactctgtggctaaattgccttacaaatacagtttagatggtatttccaacaccttctctattgttccaggtgctcttggaaaagatgaagtcactcaaaaacaaaacctagctaccatgcttgacggctacagcaacaagggcggccaccacttaaacgttaacgtgatgaaccggtctaccttagaggatgccatggaacacccagaagaatacccacaattaaccatccgggtatctggttatgctgttaacttcattaaattaacccgagaacaacaattagacgttattaaccgaaccttccacgaatccatgtaaggaagggggcaggacaaaaaattctagtaaaggggtatgagtatgacagaagaaaacattggctatgtccactcgacagaaagtttcggtacagttgatggcccaggcattcgctttgtggtctttatgcaaggttgccggatgcggtgtgagttctgtcataaccccgatacttggaatattgggaccgggaccccttatacggcccaagaaatgttcgacaaggctattgactacaaggaatattggggcgacaagggtgggatcaccgtctctggcggtgaacctatgctccatattgatttcctgattgacttcttcaaattggccaaagaacacggtgttcacaccaccttggatacttgtggccagccctttaccaaggatgaacccttttacagtcgctttgacgagctgatgcagtatacggacctcgtcttaatggacatcaagcatatcgacagtgacttccaccgtaagtatactggccatcccaatgaaaatatcctggccatggctaaagacctgtcagagcgaggaattccaatgtggattagacacgttttagtccctggccggtcagattttgaccaagacttggaaaaattgagccggtttatcgaccaattgggctcagtggacaaggttgaggttttaccttaccacaaattaggggtttacaagtatgaagaattgggaatcccttataaattagaagggactgaaccccctagcccagaacgggttgaaaatgcccaacgaatcctaaaaaccaaaaaatatcaataaaactccttcctaataagataagaatctgccaaagatcactcgattgccgagaaagagatccttggtctgcaaagaggctaactgtgacctgttagcctcttttttgctattggttaagttagctcggtcaggttaaatgtctaaaagtaagtctaattaaaaataattataggtgtttttttgattcaagatggtataatagctttaacaaaatacaagattagaggatggagcttatgttgacctttaatgtccagcggtataagaatggggaggggactaagtcagttatccccgaaataattgagtgcaacttgatcaattctgaaacttgccgaaaataataactgtgaaagataggtaagaatatgaaaatagtaattgcgagtaaattagccttgattgccttattggtctatttcttccttgaccctcaagtattcttaacaaatgggtttataggtgtcgatggagctgttgtctgccgaggcttagccttggtctttgccgtaaaaatgacctatgacctggttgaagatatctacaatgaatatcattaagtaagtttattggtgtcaccactttaccacttgtttttataacttttttaaaccaggccggtccttgcctggtttaaattgtattttggctcatttttttataagataggggagtagaccattatgtgaggagaattattgtgagtaaagttttagtttttggccacaagagcccagataccgatgccattacctcagccattgcctattcccacctgcaaaagcagttgggttatgacactgaagcggttgccctaggagagccttcagccgaaacccagtttgtcttggattattttggttatgaagctcctagagtggtgaccaagtcagatgaagacgttagccaagtaagcctggttgaccacaatgaacccagccaaagtattgacgacttagaagacttaactgttctttcagttgtggaccaccaccgcatccataattttaatacttccggccccctatactaccgggcagaaccggttggctgtactaatacgattatcctaaaactctacaaggaaaataatattgagatccctaaaaatattgctggcttaatgctgtcagctatagtttcagacaccttgcttttcaaatcgccaacctgcacagaagaagaccaagaagcagcccaagaattagctgacctagccgaaattgacttagagtcatacggcttggaaatgcttaagtctggtacgaacaatgaaggcaagtcagctttagagattgttgacggcgatgccaaaagctttgacttaaacggacaccaagtcagagtaggccaggtcaatgtggtcgactttgaagaactcctagcaagaaaagaagaattgttagaggccatggccaaggaaaatgaagacaagggttatgagcttttcctcttgctgatcaccaatatcttagacgagtgataccctaggcctcgttgcaggagaccactacgaccgggttgaatcagcctttgagtcaaccatcgaaaaccaagaaatcaagttacctggtgtcgtttcccgtaaaaaacaagtggtcccaccattaactgaccatttttaagaggataaatcatataaaaattaattataagaacattgattaagccctttatttgtgaaataatgtctataaggaaaaacaaatggggtggtagaatgttcagaaaaaaccggtgggatcatttcttttatccaggtttaatcttggttgctcttggcgctttgttgctggtggctttccaggctagtggtgccttagaaagccaaaaggttgaagcagaacgtcaagaagccatcgaacaagcgcaagaacaagaaaccgatgtcgacactgaagcgacagaagatggcgattgggatgaaactagttcaagtgatgcggatagccaagccagtgaagatggtgattgggaagaagaaagtgatgcctcaagtggtgcccctgaagatggtgtctgaaaagcctaaggcaaggccctagctgttataaggcagctagggcctttttgtttttggttaccgcttagggtcctagcaaagtgatatcaataacataatatgcgtaatgtataaccagtaacacttcttctacctcgcaagtaagacttttccttgctattattctttgtgagtattatactttacatagagacttatctatctagtgaggaggtgttttatggattatattgctcaatcatctcttattaaagccctagctaaccccaatagattaaagattattgatatactatcttgtggggaacaatgtgcttgtgaccttttggaacactttaactttagtcaaccaacgttatctcatcatgtgaatatattatcaaaatctgacctagtgaaagttagaaagcaaggacagtggaattattattcactcaatcaacctaaatgcactgaaattataattgacttaatgcagatgtttaatcaaacagaagaatgtatttgtaaagaaaagtccccaatttgacccataggaggtataacatgaatcaaatgactatttttgacccagccatgtgctgttcaaccggagtatgtgggccttctgtcgacaaaaacttactccgagtggctactattattgataacttggaccaaaatggggttaaggttacccggcacaaccctgccagtgatcctaaaatatttatccaaaaccaaaccatcaaaaagttgttaaataaaaaaggggtcgatatcctaccagtcactgttgtcaatgatgaggttgtcaagacaaaagactatcctagcgaccaggaatttatccaatatttagacgtaccagaagactatattaaggcaaaagcacactaatcgccagcaaggcgaggagggaaattatgtttaaagaactgaacttggaaaatatggacttgaataagtatctatttttcaccggcaagggaggcgtcggtaaaacttcaattgcctcagccattgctgttaaattagcagacttgggtaagaatatccttttagtttcgactgacccagcttcaaacttgcaggatatttttgagaccgacttggacaacaagggggttaaaatcaaccaagtccccggtttaactgtgaccaacttagaccctaaccaggcagctcaagaatataaggatagtgtgatcggtccttataaaggtgacctgccccaagccatggttgataatttggaagaacaactttctggtccttgtaccgttgaaattgctgcttttaatgaattttcttcctttattactgacaaagaagctgcttcagcctacgaccacatcctctttgatacagctcccacaggtcatactttgcgaatgttgcaattgccatcagcttgggctagctttattgaccagtctgaacacggagcttcctgcctaggccaattgtctggtttagaagataagaaaggcctctaccaagaagcagtggccaacttagctgatggcgaccgaacaagcctctttttggtcgccagaccggaagagccagccctgaaagaaggggagagagctagtctggaattaaaagaggtcgggatgaaccaacaaatattgattattaatgggctcctaacttcatgtgatgacgacttgtctcaggctatttatgatagccaggggcgagctttggacaatatgccagaaaacttgctagacttgcccacctaccaagttcccttgaaggctaataacatgactggtatcaataacttacgagcctttttccaagaccaggctccccaagacctggaaaccggggccgttagacctgacttatcaggtttgaatgccgtcattcaagacctttatgataaggataagaaggtcatcttcactatggggaaagggggagttggcaagacaacgattgccgcaacagttgccattgaactggctaaaaaaggcaagaaagttcacttaaccacaactgaccccgctgaccacctgtccaacgtgatcgatggcgattatggaattaccatcagccacattgaccaagaccaagtgctggctgactaccaagaagaagtcttatcctctgctagacaagacttgtctgaagacgacttagactacattaaggaagacttgagaagtccatgtactcaagagattgccgtcttccgggcctttgctgagattgttgaccgatctcaagacgaagtggttgtgatcgacacagccccaacgggtcataccttattgctcttagagtctacccagtcctataaccaagaaattgcccggacccaaggccaagttccagaggcagtccaaagactactcccagttttgaccgataaaaaccagacagaagtcatcattgtcagcctagctgaagcaaccccttactatgaagctaaacgcttacaagaagatcttacaagagccaatatatactccaagtggtgggtggtcaattccagtttctatgctagccaacccagtaatgatgtcttaaaagctcgggctaacaatgaaatagaatggatcaataaaatagaccaggaatctgatggtcacttagccttgctcaagtgggaggtccaagacttgaaaggcaagaagcttgaggtcttgttataaaactataactaaaaatcaattcagaccaagtcctttaaaagacttggtcttttaacatctctagaaatctagaaaacataatggatagaaattaaaactaactgtagggaataacccttaaaaactggtctagttaattttattttttagatatcaaggaaaatgtattattggattaatgctagattcctacaattagcaatcgatatcctgctatgtataaatggatagctgatggttgaattgatcattcataacatacagatagtgccatttaaggcaacttggctcaataaaaaagtatggctaacaaagggatagacaatcctgtgactcattcaatacattcaaattagctgctatctttttaaaaatggaaaagtttcaccgtgacttggatatgacttgaataaatttgaaatccgacccaaaaagagctggaaagtcttagaagaggggtagaaatgggttttgcttgtcacttttaaaaatagttattggctattaactttgtataatatatattatgtaaactaaaataaaaaagaaaaaattcaccttccaattttttcttttgaaaggcaaatcctcccccctctcggtgattttggggtgaatcaggggcaaaagaaattcaaattccttttaatcaagttattttcaatttgatgactggtttttcttcaaatttttagtcatccgtcaaatgattgcttattatctccttgagtaatctctttcaaatactgcccagtatacgactcctgaacatttaggatacccttggctgggccttggtaaagcaagtcaccgccttgtcgtcctggtcccggccctaggtcaactaaccaatcagcatctagcatgagactagcgtggtggtcaatggcaataacagtattaccttgttggataaggtaatgaattaagttcagcaattggtcaacgtcagctaggtgtaaaccagagctgggttcgtctaggatataaattttcccctctttttgcagttctgaccctagttttaaccgctggagttcaccaccagaaagacttgaggtggcctggcctagtgttaggtagtctaagccaacgtcttctagcaagcttaatggctgggtaattttttcctggccagcaaaaaaatctaatgcgtcattgactgttaaattgaggacgtcgactattgactgaccctggtaggtgtaagtccgggcctcattggaatagcgtgttccctggcaatggtcgcagacaaaactgatggggtctgcaaaggctacatcgggttcaaggactcccttgccgccacaaaccgggcaagcccctttggagttaaaggaaaacaagcccgggtcaacttcattttcttgggcaaataaattccggatcttgtccataatattaagataggtagcaggcgtggaccgtgaagaaatgccaataccagcttgggacaggtagatagcttggggataagcctttaagacctctccctggattagggaggttttgccagatccggccaggccagtgaccatgctaaaggctcctagaggaaacttaacgtcgatattttttaaattattgtggctagctccttccacctggataaattcttcaaagttttggacgcctggctcggcaaattgctgtggacgtcttaaatattgaccagtcttggtatcagactctaagaggtcttggtagcgaccttgaaaaatcacttgacctcctttggatccggcttttggtcccatgtcaatgatccaatctgccatggccataatgtctcggttgtgttcaaccacaattaaagagttatgattggcttttatctctagcaggaggtctttaattttccggctatcataagggtggagtcctgcagagggttcatctaggatataggtcatattgtttaagctagaggtcaagttggccaccagttttagccgttgtcgttcccctccagacaggctagagataggacggtcaagagttaagtagccaattcctgcctcttccatggtcttgacaacggtgaggatttgctgggccagtccttcccccatctgaccttcaactttttgcaattcttggcttaattggtccatttccatctgggaatagtcgacaatattgcagccgttaatggttgaatgcaaaacttcttggctgtagccagaagcctggcatttagggcaaggctggctgataattttagcttctgtttcctcttgaacttttttagaaagtcgtgaaatatcccggtttaaatagagtcgttcaaagcggggaattaggccctcgtaagtttcggtaaacgactggccagttttgtcactattaaagaatactttatagtcttggtcgggtccatagaggaggttatgccactcttttttactatagtctttcaattttttgtcaggatcaaagaggccggactcaacaaaaattgacttctgccaagacccgccaatgggtttaaaattaatgccattctctgctaaagtagattctgggttcaccaaggcttccttgtcaacctggcggatctcccccctgccctggcactggtcacacctgccttgagggtcattcttccggtaagcagatgcttctcccacactgggctggccaatccgggaaaacaagagccggatcaagggagccaggtctaaggcggtttggacgttagaccgacttccaccagtcaaattcttttggttgatgactaaagatggggtcaaattggtcatttcttgggcatcgggtctttcaatcaactccatccgtcttcttaaatacatggggtagtttttgttcatttgccgtttggactcggcagcaatagtgtcaaaaaccaaggaagacttacctgatccagaaacaccggtgacgacaactaattgattttttggtatttctaaattcaggtttttgagattgtttaccttaacaccttttaagacaatcgcatcttgggtcatccatctccaacctttctaaataaggcttataaactcggttttgtgaccaaagttataagactatccttatttattatatcaagcttgccttgtctgaccaaggcaaagaaacaagactagtatttgagatgggagtttgtgaattattaaacattacctgccttccattcttctaaatccatggctagtcttggatagtccttgttttggataatggaatagcgaaaggcttgttttaaggggtcatcgtcaaaagaaccaataacatagcctttttgacctagatagcgggctaagtcttgggccttactgccataggtaaaggtaaagttagcagctgtttctttaatatttaccaagttcttgaccttagccatggtctcaactagggtctttctagactccagctggtagttaataaaatcttttaaatgatttgtatcctccatgaattcactagctaaatttaagtttaaatgactaatcggaaagggacttttaccgagaccagtaacctggtcaaatatgtctcccttcccataaagaatccccaaacgaaggccggccatcccatacattttagacatggttcgcaagatgaggacatggctgcctgtcggtcgcttgtagtcctggccaaattcaatataggcttcatcgataaccaggtagcctcctatttctatcatcctatcagccagggcctggatttcagtttgagaaaattgtttgccggttgggttgttggggcttgagaaaataaatagcttaggtttgactttttgaatgcggtctagggcttgatcaatatggaagtcaaagctttcatcagctggaatggaccgtaaatcaacctggtattggcgggaatatttgaagtacatgataaagtccgggtaaaaagttaggatgggcccgtgacctccaaaaaaacggactaagcgtttgacccattcatctgaaccattggccactgctatttggtcactaggcagaccggttagtcggctgtaattttccttaaatcggtcaagttcagctcctggatattggttgacctgggtcttctccagggctctttggatatgggcaggttgaaagggagatatggggctggtattgcggttcattttgatcatcttggtccttctttccttaaattttggcgtggctggcatgctttaatgcaccatacagttgtgatggtaatgcaatcttataaaataatttaattttaatcaattttctttatatattataaataaatgaatccagtcttttctttatagtaacttacttgtaataagtgtcttgacgtgaatcctgtaaccgtttagcttataatgggggttgaaaggattgataacatgagactaagtgtccacgacttgatgacttataaagatggtgaaacaccagaagaagtttatgaccggacccgtcaatttgttcaagaaattgacaaattgaactatacccgctattggtttgctgaacaccacaatacaacttactacgcctctgtatcacctgaattaatagctacccacatgtcagcattaactgacaacttacgtttggggactggtgggaccatgattatgcactattccccgcttaaaattgctgaaaatgtcagaaccatggatgccttggcacctggtcgggctgacatcggtcttggccgggcaccgggagctggccccaacgaaatcttagccttggctgaaggccagtcccagacttttgacgacctttacaacaaggtccaagtcattctagactacttgagtgatgaaaaaccggaacgattttacggtcgaacagaagctgcccctaaaggtttaagccacctgccccaaccttggatgctggggtcttctggccagtcagctacaaaaacagcagaactcggtttgggttacagttttgccaagttctttggcattgaaaccgatccggaaattttcaaactttaccggaataatttcaagccttctgttttctttgacaagcctgaaatcattgtttcttatatgattattgtcgctgatacagaagaagaagccttctaccacttcaaaccagtgatcatgaacttgatgtccatccgggctggtaaaatgatccccattcaccaccctgaccaagttaaagattatgaatttagccaagaagagcaggccttcgttgaccgctacctggataaacgctttgcggttgttggcagcaaggaacaagtcaaagaaatactggaagatgaagttgataaacttggtatcgacgaaatcatggcctactcccctatctatgacaatgaagctagggtggcctcttaccgtaagctagcggaaatttttgatcttgtttaattatagcataaagccctgttagccccttcttactggggactaacagggctttctttttactttgtcttaataaaattaattcaagacctttagtggttgttcatggcttggactaatttcgcatacatgtctccttttaattgagggatagacagcatggtgataagagagatgatgtagaggccagctaggaagaacataaccatagagacccccgagcgctctaagatgaagccaatgatgacggaagaaaaacctccgacagcccgtccaacgtttaagatggtattattagcaatagtccggattcgttggggatagagttgggtggtcactgcagcataaccggtgaacatgccgttaacaaagaaaccaacgatggctcccccgataatcatggctaatccagtttggaccaaggtgaaaaggtaaacggataaggctgaaagggttaaaaagatggcaaaacttttgcgagggccgattcggtcgaaaatctgaccgaagacgagcattcctaagcacatgcctaggatggtagctaccatccactgggaggaatccccaactgaaattcctaactgactttgcatcatggtcggcaaccagttcatcatgccaaaataaccagctatttgaacagtcgccataatcattaaggatagggtgagcctggttaaattcttgctggcaaacaagtctttgatgctagcttgacttgcttttgcctctagcttctcccccaggtcatcttcggtaatttggtcggacttgatgaaaaattgagcccagacgaccaaaagaataggtaggaggcccattaaaaacaagccccgccagccaaaaaatggagcaactagggcagctaggagggctgaaacaatactgcctagctggccgactatcccgtttaaggaagaaactcgacccatcttttcgagaggaacgataccggccataacggagatggcaactccatattcgccacctaccccaatacccgctataaaacgaaggaggtagataacataaatattttgggctagggaattaaaccggtagccagactgaagataaggatagttatctttaaaacattaaacctatgataacggtcccccaagaccccaaatactaggccacctaaaagcatccccagattggtgatcgttccaatccagcctgcctgggaaccacttagactaagttcggagataatcgtagacagggaaaaggataagaacatgacattgacatcatctagtcctgccccaatcagggaaaccataaaggctcttttatcattacttttcatcttggtcgactccttcttttactaattagcttgtttggccctgtcagaccaggcttcagggtcttggtaccaggccttgagggttctttcttgggacttgaagtcatggttttgaacagcatagtccaccaatgaggggtaatcagttaaggtgtggagggggtagtcgacttggttaaaggcttcctgaccacttgctagaccgtaagtaaagatggcaactacacccaaaatttgtcctccagcttggctgaccttgtgggccgcttggatgacactgccgccagttgagattaagtcctccaccatgaccaccttttgccctttatggaaactgccttcaatagcattctgcttgccatgtccttttttgctggaccggacataaatcataggtaaatttaatcggtctgctataaaggcagcatggggaatgccggccgttgcagtcccggcaatcacttccacatctgggtggtggctctggatcaagtccaccagactgtcttcgatcaagtccctggcttggggctggctcattattaaacggttatcgcaatagatcggtgttttaagaccacttgaccaggtaaaaggctggtcgggactaagtgaaaccgccccaatctctagcaatgtcttagcaactgccttagccttgtttgctgtcatttatctctctcctttttgtttattccatgcttggtacatttgttcataggctagccttggatccttggcttgggtgataggccggcccactacgatatagtcactctggtaagttcgggcctggctaggtgttgtaatccggctttggtcatctccctggtctgttttaagccggatgcctggtgtgacggttaagaagtctggaccaagttccttgtgtattctagaggattccagtggagagcacaccactccgtctaagccagcctccttggccaggcgggcaaagtggttgatggagtcttctagactaagggttgacacctggtcccttgagaagtcttcctcagaaagggaggtcaactgggtgacggcaattaatttcggccggtctcccctccccttacatccttcttctaaacctgctttagcagcctccatcatcttcagtccaccttgggcatggacattgaccatcgccacccccaactgggctaagactttcatggcctttttgactgtgttagggatgtcgtgaagttttaagtccaaaaaaatatcgtgctgaccttggatcagttcatgcacgatatttggaccattggcatagaaggcttccatcccaattttgatatttaatttttcatcagcaaataaggctaggaaatcacggatttgctttttgtggttaaagtcaagagcaataataggcttggtttgatccattttgcttcctccctttagtcagttagataatttttactcaaacttccaacattgtaaaagggatggctagctttgtcaatccttttcttcactattctagaccgaggtcgcaagctaaacttactgtcccctctgcctttccattaaattcaatcctacccccataaagagaacacccatgagggctaagataagaataacctggcccaggtctcctagctctagctgaccatttatagcagataaggccccttgcatggcatgtttaatggggataaattctgctaaagttaataagaagcggttggatacaatctctagtggccaaaaggctccgcctaacatggccatggctacagtcacaatagggatcaaggcatttaaggctgtcaagctggggctaatactgactaggaggatgcctaaagctacgatggcgaagagaaagactaagataacaactgccataggataaataccaggaccaaactcgatgcctagcagcctggttaagatgatgaatgataagaccaattggaggacccctgccaggtaatagtggactaggttgccaaggtaaatctgcaccttagacaagggggagacaatcagccggctccaaaccccagaagtcctttcttcaagaagctgggactgtaagaaaaagacagtgagggtgacaaagaacaagctttgtccgattaaggcttgaaattgataggcttgccccccttgcccctctccttctaggtattggttttctaagtttatcgtaggggtaaggtcgatttcagcctgggggaattggtcacggacctgtctaatgctttcttcctgtcctagtttttgtttgagatagttatcgaccaggtcgacctgtccatcttctctagccacccacaaggtgtagtcgtttttttgaaggtctaagacaaagggaactcggttcatccgcaaatcttctcttgcctggtcagcttggatgatttcaaagttaaaggaatcgttttggtttaagttctcgactgtctggtttaaatcggactggtggaggtcactcgtgtaggttgaaacttgaatttgagctggttcttgactggcccctatgacaagaacaaaggccagggtcaagccaaaattaaccagaaacataactgggtttttcaacaggcgtttgatttggattccaagtaccttaaacatttaggtcatcctccttttagggtaaatagtgagggctaataagactagcccagctgcaaccaggcctaaccttagcatggtagggaatatttcttggagactaaagccctgtaaggcctgcaagtaagcttgcaaggctgccccatttggagtccattctccaatcttgattaagctatcagacacctggtcgagtgggaagaagctaccgcctagcaaggcaaagataaaaacgagtagactaaaactgttggccacagtccgtttctttgttcttatagttagggagacaagaagggcccctagactcgctacaactagggcaaagaataaagttaaactagctaagcccaaccaaaaagtcaggtctttacctgaaaagactccaaaaaacaaggtggaaaaggtgaataagatggccaattgaccaagcgccaagaagaaggaggcaaaaaacttgctgaagaggtaagacaaccagggtaggccagctatggttaggcggtcgtaaaggtggtttcttttttcttcaaaactgtttaaagacacactgacggggataagcaaggcaaacatcacccccatagccaaggtgaaatattgaaaagcggtgacgggatcttcaactgacaagctttggatggctccaatttggtctcggttttgatcggtttgtccttgaccttggctggccgtcatcaaggagatttgaaggttaaattcatctaatacctgcttggttagatcagcaaataaattcgaatagaaactttgctggtttttagcctggaggtctagtcttgcttggctatcctcccctagataaatagaccggaggtagtggaggttaaagttttcagggaagtaaaggtaggagacaatttcttcttcctctaaggcctggttggctaggtccttattcgaaaattcttctatctccactaggttagctaggtcaggtgaagataatacgtcggctaggagggcttgagggtcgttatttctggcagcttccagcaaactttcttgagcttggtcagggtagccagcttgactgaggtctttctggaagctttctagatcttcttttggggaagaatcgctgaccaaacctaccttaaaagactcaaggccctggtccccactcaagataccccctaaggcaaagcccagaataagaatcaaaatcatcggcatgaggagtaattccatcagctcactcttatttctagccaggttgagcatatcttttttgatcaagttaaacatactaaccctcctaatcccgcaatcggcggccagtcaagtgtagaaagacatcttctaaactaggattgtggatgctaagccggttgatttctagatttaattggtgggctatctcaaagacttgggtcatggtttctttttcattagaggcaattaattgataacccctctcagtatctaagacttggttgatattggcctggtcgaggagtttttctttaaaagatgatgatttttggaccaggtcaacttggatggacttttcattattgaggatacttttcaaatcatcgatcgttcctgctgcaataatttccccatggtccataatgtaaacccggtcgcatagtttttcgacttcttccatgtagtgactagtatagaggacggtcattccttggctctggttgagcttcttaaccatgtccaggatatgactccgggactgggggtcaatgcccacggtaggctcatccataactaagatctgaggagcctgtatcagggctaccccgatatttaaccgccgcttcattccgcctgaatagtttgttaccctctccttctgccggtcttttaggccaatttcttccagaattgtttggatccggtcttctaaatcttttccctttaactgatagaccttgccaaaaaactttaagttttcataggcggtcaattctgggtaaagggcaatctcttggggaacgagaccgagtgcctgacgtagaggtttaggatttttaaagcaatcctcacccttgtatatgaggctccctgaattagcttgcatcaaggtagacagaatagatatagtcgttgacttacctgccccattgggacctaataaaccgactgactccccttcttctaaatgaaggctgaggtctttgacagcttggaattttttgaagcttttattgatttgccgagcttctaacatggtcttcccttctctctttttgatgtagttagagtatagccaaaaaagggcagtcaaaacactgccctcggtcacgacttaatgtgactttagtcatctctttaagtgatattgttgtggatagcatagatagccagttgggttcggtctctcaattcaagtttgtccaaaagagtggacaccaagtttttcactgttccaactgatagaaataattcctggctgatctcctggttactcaagcctcgaccaagataagtgaggatttgtaattccctttcagttaagttacctgttttaacctggtccttaacctggctgggcctagcctgtttgattaactggggtaagaccttggctgccacctgatcttctaagaccagccctcccttataggcactcttgatggactgggttaaacggtcggcctccccatctttgagtaagtaacccctcaccccatatttcagggcttctaaggcataatcttcatcattaaaggtcgtaagcattaggatgatcagatctggccacttttttcggatggtccgagcggcttctaggccggtcatgactggcattcggatgtcgagtaaggccaggtcaaaggcttggtctcggcaaagttcaagtgcttcctggccattttgagccagtccggtcactttgaggtcgctgtccatttctatcattaatttcaagctttcacggaccaaggcttggtcttcggctagtaaaatcttaatcatgaatatagcctcctaaaggaatttggccaattactgaaaaggtctggtcagattggtcgagggttaagtggccatttagttgagtcaaacggctccttatattggtcaggccaaagccctccttaattttaaccggtttttgtaagggatggtcaacctgaaagcggatgtcccggctggcgaccaggctgatggtaatttcagcttttttgacctgggaatggcgcatcatattggtcagagcttcctggacagtccggtaaatggctactgcctggtcgttagatagggatagacctaaaacatttgcccccaacttgatggtcaagttcagttgactttctatttctaacttccggatgagctggataatagctggaatgccggacacttcttcggtctgcatggtttggacggccatgcgggtttcatataaagaagtctgagctagtttttttaattgggctagttggcccctagttgaggggtcgtcttcttttagacgggcgacttccaattgcattaacaaggccgtgagccggtgtcccacagagtcatggatctcccgggctagccggtttcgttcttcttgccggatatggtcatccatggccactgactcttttttaagcatggttaagagatcttcaagttggctgatctggccagcctgcttttggtttaggtctttcaggctagtgtaatgccaggcaaccagacctaggaaaagccaggataagctgacaacggctaaggcaggccaatgggaactagtaactaggcggatagcggttagggtataggaataaagggcaaataaaagcacttgattgtgcttgaagtccttgactaaatagctaaaaagaaacataaaaatcaacacgataaagcttggctggttagtctcaaaggataacaaagctaacatgaggggtaagagccaggtagccagtgatcgaaaaggctttcttaatattggtaaaagaaaaaaggttaggaaaaaagctaaagacaagactaatccaaattggccaaagctaaaggccatggcagtaatgaaccaagacaaaaatatcaggataaagttgggccaaaaatttaccatcttttctttacctcctacttactaacctaagtttacaggataataaggattttgcctaggagcttatgaatagaaagaccataaaaaagaggccggtttacggcctcttttttatttaattccctttagctttttcttgtgctgtttaatcatcttcaagccacgacgggctgtttttttatttgggcttttcattagccggtaagctactgctaagtcttcttttgctgccactttacctcctcctttcaacttttaccaagaggcttttttgacaccagggatcttcccttggtgggcatacttgcggaagttgagccgggacagaccaaatttccgcatataaccatggggccgtccatcgatccggtccctgttccgcaaacgagtaggtgaagcatctcggggtaacttggccaagccttcatagtcatgcttgtccttcaattcttggcgtaggtcgcggtacttttcgaccattgcctcttgttttttcaattttgcaattttagatttctttgccaatcggaaaacccttcctctatttaattcgtaactattacgatttaaaattatagctaattttttcccttctgtcaagctggttatcaaaaaagatgaccgactagacattgatctaagacggtcaccccaatagctatatgagtaaaggtcattattgaattgttgactaggattaccaaaatcgattgaggaccgtcagcacactaaacacccatccccccgtctaccctgtattggacaccggtaataaagtcgctggcatcatctgccaaaaagaggaccaaattggagatgtcagaggattctgcatagcggcctattgggatagacaaggacatatcttcttgactggaccccatcccttcttctacggctctcatcatccgggtattgaccggtgaaggatggaccgaattgacccggacattgtcggctgctaattccagggctgctgccttagttaagccaacaaccgcatgcttagaagcgttataaggtgacatgcccagggaaccgtctaagccggccacggaagccatattgatgatgctgcctcgaccagcttctagcatgaccgggacaacatacttcatacctaaaaagacaccgtttacatttacatccaagactttagtaaagtcctcaaaactttgttcatgaataggagcaaccttgccttcaataccagcattgttaaagaaaatgtcgataccagaaaattcatcaagggtttttggacatagtgtttcacgtcttcttctttcgtcacatccgctactatggtaatgaccttgccgaattcttttaattcttccctggattcgtttaaggcctcttgggaaatatcgactaaggcaacattgcccccttcttgtaagaaatccttagcagttaccttaccgatgccaccagatccaccagttatgacaacgtttttaccttcaaaccttgacatgggaattcctccttgtcttttgggtcgacttctgctactactattattttataataagataagtgtgttttttaatataatttaattatatatctacccatatatattatcgaaaaatgatcaaaaaaattattataaaacaagcaaattttaattaggtcaagtccttcattagcccgacaaggcttaggccacaaaaaaactagcaggcaggaacctgctagttgagcttgctaagtctaatcatttgacatgtatttcggattatcgaagaagtcttccttgatggccttgacctcaccattgagcatgataataccgatcatattcggtaggaccacaaaggctagagccaggtctaggtaggctccagcattttcaaaactgatgaacatggagaccaagatcatcccacaggcgatggctctgagcaagagacctccagtccgaccaaacaagtattcagcttgtttctcgcagtagaagacgatgacaatcatcgtagagacgacaaagaggaagaggcagatggagataaccactgaaccaaagacacccaaggattcattaatggctcgctctaccgcaaccggcatggtctcgttcaaagcttgttcactcatacccggagtccaaaccccagtaaccaagataattaggccggacatggtacaaacaaccagggtgtcgataatcacttcaaagacaccccaaaccccttgacgggctgggtggtcagtggtcgccgcagcgtggccaaaaccagtagttccgagtccagcttcgttggagtagacaccacgagctaccccatttcggatgacattttggagggtggctccaacaaaaccgccggaaatggctttcgggttgaaggccccaacaacaaccatccgaagggcgttaggaatttggtcgatatgcataactaggataatggcacccaaaaccaagtaagtaatggccatgtaaggaactagtttttcggacaatcttccaatcgacttgaccccaccgtaaacgaccaaaacagttaaaataaagatcgcaataatggtgatattgcgggcaagggtattatcaattccgatggcagccgctacattctcaacaggaccagctgccgagatggtctgcaaggaaatagagggtagaatttcaatcatcaagataaatgaaactaaaaagcctaaaattttcccaatattattccggatccccttgcggaagacatagctggcaccacctatgtactccccatcttcatttttctcccgatacttgatggctagggctacttccccaaacttagttgcagaagtcaaaattcctgaaacccacatccaaaagagggcaccaggtccagctaggaagataacggttggggcgacaacgatattggcagcaccgatggaggaagctagggctgtggtcatggcctggaaggctgtaacggtcccccgtccattgtcgtcatttgaaaataactgaccaaaggtttccttcaaaataaaaggtaggtgcctaatttggaaaaatcttgtgcggagggtaagtaggatgctcccccctagcactaagataatcatgggttgccaaatcaaatctgctaattcttgtatatctggtaacatggtattcctttctaattttacattcacacacccatctttgcaggtatcaaatgcacaccacatttgtaatcagggaaaccgtaatggacagttattcaacatctacaagtattaggtataagggacagcaacattctaataaaacagtaaatatgttctaattatacacacttcctgaaacaagtcaaataaatttcattatttatatattattttataacaagttaaattctgatccaggctctggaaaaatctttgtagctttagtcctcgactcgattcttttaatagcctgctttgccttaagataactagacagtcatcttctttttcactgaggcagtcccacagggcatccaggttgttgcctgaacagttagttaagtctaaacggtctttcaggtaattaaggtcttggccggcttggattaagtctcggcaatgaatggtcactatatccatctaaacccccttagcttggctgggttggacttcttcaaagttatcgtaatggtcgtcagtgtaaaaatacaagccgtcatctgagaagactaggcgttcagcattgcgaaagcctccatcataattgatatctgcctcataatattgccggccaggctcatccggtaagttcccctcaaagttgccaaagacgtcgcctcctatggacatgccgggggccacttcatctaaattgccttcactaggtacccaacctaagttacgggcttcttccttggtcaggtaattatctggcaattgctgaaagttatcgataaagtccaccacattttgcttgtcagtgtagtggccgtttgggtctaatgctcctacttcagcctgaccttcttcatccttccaagtttgttggcttgcagcttggtcactaccctgactagcttcttcaccgactaggtctatcccaaacaggccaagcaagcccaggattagggcagctagggcagacaggacttgtttttgttttttggtcatgacttgcctctctctatgatgcttttagcataatttaactgaagtctagtctaaacttctggagtaaagtctatagtagtaacctttttgatccatcaggtcttggtggctaccttgttcgataatgccatcgtcggttaaaacgtagattaggtctgaatcctcaaccgttgtcaagcggtgggcaatagtgatggtggtccgtccttgggctaatttatccaaggattcttgcacaactaactcactttggttgtctaaggcagaagtcgcttcatctaggattaagataggtgggttttttaagaagacccgggcaatggaaattctttgtttttgtccgcctgatagccgggcccctctttccccaatattggtgttgaagccttctggtagttcacggataaagccagtagccccagcaaggtcggcagcctggcggatttccgcatcgctagcatccaacttcccataccggatattatccgctatggttccagcgaagaggtagacatcttgttggacaatcccgatatggtctcttaaagaaaagaggctgatgtcttggatattgtggccgtcaacgaggatttctcctgacgttaaatcataaaaacgggggattaggttgattaaagtggacttgcctgccccggatggtcctacaaaggccacttgctggccgggttcaatggtaaagttgatgtcatccaagaccctctccccattgtggtagtcaaaaactaggtggcgggcttcaattcttccagccacatcttccaattcaatcggatgggaggaatcgataacccgtggtttagcagtcatcacttcatggaagcgttggataccggttaaccccttttggaagttttcggtaaactggatgatccgcttcaaactggtaatcagcatattgatgtacataataaagacaatcatgtcagaagccagcatggacccatttaagatcaagacacctcccatgaccaagacgataatatacataaccccttcaaaggcggaagtaacggtcataaaaccggccatggagatatagtattttttcttaatgtagtaaaagtcctcattacctgttttaaacttattaatttcctgatcttcattggcaaaacttttgaccacattgataccagacaaggaatcttcaatcccagaatttaatttcccaatctgccggcgttggttcatctgctcatgacccattttttgccggaacttacgggagacgacaaacatcaagggcagcatgataaagatcaccaaggtcaaaggtaggttgataatgcctaaaataataaaggaaaccacggtttggaccgcaaaaatcaggtattcttcgggggcgtggtggctgaattcggtaatgtcaaacaggtcattggtcactttggacattaactcccctacccggttttcattgtagtagtcattgtccaaggccatgaggtggtcaaagaggtcgcgccgcatatcggtttcaatcaaagcacccatccggtggccaacattggtcatgtagtagcgggcaattacttcaacgacttttaaaacgataaagattaaggacaggctggctattatactaccagttaagctaccactggctccgtaattggtgagttgtcgcaagacaaggggcaggataaagccagccagggtggttaagagtgcaaatatcaagtcataaactaagatatgtttatattttgaaaaatacggtttaatcactttgattaagtccaatgttgacaacataaaaaatcccctttgcaaaacattaccacaatagtataacaatttttcatggtgtcaacaaatcaagttttttgttaattggttcgaataaagttagcaagtaaaaagcccccacatgctagctggagactttgatattctttggtttgtgtcagttgactttaaacctaccattaatcttttttcaggtagtcaatcatatcgggatagttggcctggatatctttgaggccggttttataagcataaatatatcgttgggggtctttttccatccgggagatatttaagtccctagaaggtctgataacaaagacctccccttggtcctctaaagccttgacctcatccagagtctggttgtattccaagtaacggttttttaagcggtcggcaaattcaggataattgcggtaagccaagtcaattagtaaggggttggtcttagacttgcggtagtctaagggttgggtcaagacaatcacaattttgtcataacccaagtccattgccttttggtaaggaatggagtccgccactcccccatctaaataatgctgaccgtcgatttccaccggttgggaaacgaagggcaaggaagaagaggcccggaaaacttccacatcttggtgggcatcctggaccttgaagtgttcagctaagcctgtttctaggttggtgactgtgacataaaaatctgactcagcttgcttgaatttttcattgtcaaaggggtctaattctaagggcaaaacatgaaaggcatagttttcgtccaccatattccctgtcttgatcaagttttttaaactaacaaaacgtttgtcattaacgtaatttaagttgtatcggatggtccggtattggtctttggacagtaagttaatcccaaataaggcactagccgataccgtaaataaggcatcaaactcaatacccgtcccaataaaataatctaaaatggcagctgtgtacaagccacgcatgcccccaccttccattactaaagccgttttcatttaatcatcctttgcatcctggtttgattcaatctattataaaaattttaacaaaaaatccaggataaaacgagtatttagactaggatcaaaaaaggacagtcccagtaggctgtccttttaacttaatcttttagggtgaatgggtattggctaaccgctttggggtcaattttttctagggcatcaattaatttgagttcgaaggtcccaataccgtcagacacttgctcagcctggttgccggcttcttccaagaccaagcaagctaccaaggcagctgggagggggtcttctaccccggcataggctgagatgaggccccctaaaatggagtggataccggttaatttatccaggtaatgggccttgcgttctacacagtaaacttggtcggggcttgctatgagggttttttcgccaatgatgaccaccacccctcccgtatggtcagcaatggccactcctgctgctaaggcttcttcagcagggggctggggacttaaactgtcactaggccggccaccgtcaaaggaccataagttagccaaggaaagaatttcagctggtctacccttgatgatggtaggctggtagcctttaaattgtcgcaatagtcgcgttcttaaagaccctaatccaataccaacagggtccaggagccaggttttgccacttttggctagtatgcgaccagcttgggggatggtatcttcaaatatcggcaggatggtcccaacgttaatataaaaagcatccgtcttgtcgatcatagcctctgcctcgtcaggcatattcacgattgccgagccagcaccaattgcattttgacttctagccacaaaatcattggccaaaacgccggtcactgcccctactatgggggtggtcttgccgaactttttcgatacagctttcgattaggtcttgcgaaatctcatccaaaatggtcactcctcttcactagtcatcatttccactataaccattataactgaaaattgctaaaaacttaactagtgactacaaaacctatactgaaaggcctcaactaggtcctagataaacctataaaaaagtggatgagaaaaggcccttgtaaatggcaagggccttggcttaatcatctatatggtttaaagcttagtcatcaatttggaagaggggttgaccttcttggttgtaaaccaaactccgggcgactttgggactggccatagccatgattagccggtcccggtaaggttcagctaattggtcaaagaggtattggttgtcatctaagtcaagggcctttcgtttggctaggatttggtcatgcttgtagagtttgtaagatttggaaggcagtttttggtcactttgtaccgcttcaatccggtagaaggaatagtcatcaatgtatttaacttctagggccccagtattggtacggtagatttcatagtcataatcttcctggttaatttcccaccaagtcaagatggcttccttggcctcgtcttcactcttgtaggtcccatgctcttttctgacatcatcacgcttgttaatccagtaaatagtatagtaagtatttgacatcttaacccaactttccttgcttttgcttaatataccatagaaagctcacttttgaaacgatcttaatctgacaagaaaagggaatcggtcacttcttggtccagagtctggttttggaagaggtccaaaaccatgtcaactgtgagctcatccttggcttgtccttgaatgtccaggataatttgtccttggtggagcataatgagccggttgccgtagtcaatcgcttgtttcatattgtgggtgatcataaggctggtgatttggtcttctttaatagcttggtctgttagggtcatcaccttatcagcagccttagggtctaatgcagacgtatgctcatctaagaggaggagcttgggttttttgatggtagccatcaaaagagagatggactgacgttgaccgcctgacagcaggtctaagctgtcacccagccggtcttctaagccaaggtccagactggctaagagttttttaaagtaggccttgtttgtattggttaaggaccggccgaaaagccgtctttcccctctcttcatggcaatagccaaattttcagcgatagtcatccttggggcggtccccaaacttgggttttgaaagactcgggcaatgtctttagcccggttaacctcccccgtccgagtgatatcttttccctccatttggatcttgcctgaatcaggcttgatagctccagaaataatattgagtaaggtagacttgcctgccccattgcccccaatgacactgatgaaatcccccttgtgaatggttaagtttaagccttttaggacttgcttttcatcaagggtatcaggattaaaggactttttaatattggataagtggagtaatcgctcagtcattgtctccctccttcatggcttttaaattggattggtaatgcttgaaaaaatgcggcaaggcgatgacaagtgccaataagattgccgagaccagttttaagtcgttgggctggagccccaaggatagggccagggaaatgaggagccggtagataatcgaccccacggccaaggaagtgagccggacccctagcgagacattggcataaatcacttcagccagcatcaaggaggccagtccaatgacaatggtcccaatccccatgctgatatcagcgtaaccgttattttgggcaattaaggacccagacaaggccacaaagccattagacaacataagggctaaaattttcatttgctggaccttgacccccatggaagccgccatccgctcattgtccccagtggcaactagggcttggcctaagtcagttttaaagaagaggtgtaagccagcaacaatgacagtcaaaatcaaactggctaggaggattaggttggtttggctaggaagcttaaagaccttgtctaagatttgggtaaaccggtcttggttgagtaaactgatattggcctggcccataatccgtaagtttatggagtaaaggcccgtcatggtcaagataccggctaaaagggttggaatgtttaacttattaattaaaagaccagtcaccaaaccggccagcataccagctacaaatcccataagggtagctaggagtgggttaaacccgcctgcaatcatggcagcagaaacagctgcccctaagggaaaggatccttcaatggttaagtcggctatttgtaggatacgaaaagaaaggaaaatcccgatagccatgacggcccataataacccttccgctatggaaacaacgattaagttcattcttgacctccctctattaggctgtctgcttcttctaggatttcagacgggatggtcaagcctaagcgatcggcctggtcaaggttaaccacgagttctgtctctgtaggatcttggacaggaagattagcaatgtctgctccagctaaaacttccaaggccatttgcccgctcaaccgtccgatttgatactggctcagtccctgggttgctagtcccccacttgccaccatttcataaactgctgggaagatggggacctggttgtcgttagccacttcgaccaggctgggaaaggcagaagcaatattattgtccgttcccacccagatagcctccacttcctggcataattgggcagctacttggatgaggtcatttggcgaagaaatagtcgcttccttgacctccataccaagggactgggcatagtcttttgcggcttgactttgcttggctgaattaacctcaccactggagtaaataatccccaagcttgacaagtctggtaggatggtttggataaggtcgatttggtcctggtagggggttaggtctctcaccccactaatatttctacccggttgatttaagtctttcattaagccagcttcgattggatcggtgacaccagccatgataatgggaatatctgagcttgcattagccaaggcctggacagctggggtggcaattccaatcatcagatctgcctcttggtaaacaaatcgttgggacatggtattaaggttgttttggtccccctgggcattttgcaggtcaatttcgacttggctgccatcttcttcaaagctatcttggatgccttgttggatttcatccagggatgggtggctgaccaattgtaggatgccaacactcacttcttggtctaggctagcctgaccttgttctggatcctggtaggaaaccgtgtaataggaaacaatggcaatgaggaccgcaatggtggcaagtaattttttcaatcttttccctcctaattaaaaattagtttaaaatcgagtaggagactagccattaattggctagtcgacctctcacaccaccgtgcgtacggttccgtacacggcggttcaatatcttgcgtaagcagactcagcgatagtgcttagtggaactaagccccacttgctgagtctttctgttgttattgcacgatgaaattcatgtgtgcatgacagtcgccagtactttttgcgtgaatacgcaatccgtttggctgaatctaagtccagtccatattgttccaactttggtataatagttcgtggacgtttccaccgtttaagaatcagctgtctgatacggtgatttaaccattgctcaacttctttgataaagcttttaatgaagcctaaaccaaagtaattaatccaaccgcgggtgactcgattaatttcagtcattatctttttaaaagtacctggccgtttacgactggtcagctttctcaatctgcgtttgaatttctgcttggcttctttggtggggataaaacgataatccccattcacttgcttcatcagacagctcaaaaactttaaacgggtaggagacccaacctggcttttgtcttgattgacgattaactttaagtctttttcaataaagcgtgtgatgctgttcattacccgttcaccggctcgttttgatttaacgtagatgacaaagtcatctgcgtatcggacaaatcgatgaccacggttaaccaactctttatccagttcatgtaagtacacattactcaaaagcggtgatagaacaccaccttgtggtgcccctgtttcacttgcgataaattcgctagtcaaatcaattacacccgctctcaaaaacttacggataattttcagtatcattttatcttggatgtactgttcaagataatagataagtttgtcgtgattgagcgtgtcaaagcattgtttgaggtcacaatcaactacaacacgatagccttctttataatactgtgcacattgtttgagagcactgtgcgtgcttttccctggtcggaatccgtgactgttgtcatagaagtgcgggtctataatcggttcaattacttgccgtatggcttgttgaacaactctatcccgcacacaaggtatacctaactttcgtttttctccattcggctttggtatttctactcgtttaactggttgaggcttatacgttccatcaagtaatttcttccgtaagggttgataatacgcttgaatgtgctcctctatctcaaaaacggtcataccgtcaatacctgcagcgcctttgttccgtttaacggctttggctgctgtttccaagtttcttctgtcaacaacttgctccattaagtttggagacttacgatacatttctgtcatttcacctaaagtttactagacgcatcggcttaccctttcggttccacctattctctccaccgattgccaatctcttcgattgttttctgtcctattcgtaaactttaacctccgttctatactttgtatgaatattgttcagtccttcgctacaacgtagctactatgacctcggctgacttctcactattcgttgttactactaaacgctagtgagacctccccgagtaaggtgtgacaaccttccactcatgtcactgcttcatttactgaaagggacttgtgcagtattggactttactttgttatgcaagctcatccatctcaaatcagccttgatatgaagtttctgttcgtcagtgcgagtgtttgcctccagcttccttcagattccacctcacgatggacacccttgccttcagctaacagttcctactgccaggcctgcagtggactttcaccaccaagttgtcacccatgccgggcgcacataaaaaacaaccgtagttgactacggttgtgaaaaaccgcacagacttatccgatctatgcggtttttgctctataaacgcatagatacaggtcaatcgagttgatcagctgtatctaggcttacttgattttagttaagcagacacagctactatgcgattttgccacaaaaaacctgaaacaggatttaaaatttgattcgcttgttgcatgggtctacctccctagttttcatcagttttaaactacttatctcaagcgattaagtcaacttattcatactcagcccgttcgccaccgatgtttttaggtcgagaccgaagggcagttaaatgggcttgtccaatttggtcaatatcaaaacgaacaggaacctggacaaatttcacctgcatcccaataaaggtgtccccaatgtccaaaccagcatcagctgtgatgtgttccaccataaccgggtcgtctaagaggtcataggcggcaaccgtgcctgatccacccgcatgaagggctggtttgacattaacaatttctaaattgtggcttttagcgtattcccggtccaccactaaggcccggttaatgtgctcacaaccctgggtagccaggtaaatccccttatcttctaagatggatttgattttggagacaattgccttaccgatttcagcattggaatttttcccaatttgcccaccgacaacttcactggtactcaagcctaaaacgagggcctggccagcttccagttttgcttcttcaagcaagtcataggttactttctctacctggtctaacaactgcttttcatcgtaatcttgtgccaatctaaacactcctattatatatttttgttactcccaatattagttttgtcagatcggacctggtaggcaaattgattgttaattagttagcttggttggattggcttaggtctaagccagaaatttggtctagttcttgataaagggcgcgcaagatgcgggcaccgaagacaaaagtattgataaggggtctaacgtcttcacctgtaatacctaagttccgcataattaattcgccatctttggaaatggcaaagtggtagtagccacttcgcacccggttgagttcatttaattcttcaaggacagaccctatcttgttgcggtcagtaacgtaaccaattctattgtaggtaatttggtagttaacccggtcgctaggtgattcttgaataataacagagcagggaacaaccttgtctttgttaacttgtaggccggtttggaaggcgtgttgcttttgggtcacttcttccccatctttgtttttaatcggttgttcaacaacccggtctttaaacttcacattctgatcatcggcaagttgcttgaatttttcggtaatcaaactcataatattcctccaaaagtctatgtatacattcagtataacttattttgacaaataaacaaattattttactatcttgccctagcctaggatcttaacgagtcaatatgaatgatttttaacataaaaaatgaccaaacctatcgaaagtaggtttggtcatttgtggccacttaacggcgcatttgttcacggattcgggttgccttaccagtccgtttgcgtaagtagaataatttagctctacgaacgcgaccacggcgggtaacttcgatcttagcaacacgtggggagtgaactgggaaagtccgttctaccccaactccgctagaaattttacgaacagtgtacatttcactgattccttgtcctcggcgactgataacaacgccttcgaacaattggatacgttcacggctcccttcgacaatgcgggcgtgaacgcggacagtatcaccaggtctaaagtctggaatatcatctcgtaactgctctttggtaatttcttcgatcaatgggttcatttttctactcctctcgcgcaaccatcttgggtgcttggtcctagcggatgactgcatgatatggtgctaccaccaattaaacatactagcataaaggcttcaagcttgcaaactttatttgtattttaagtctaattcttttaaggtttgctgaaaaacttgcggcaagtcgctagtaaaggataggcgctggccagttctgggatggtcaaagcctaaagtcttagcgtgtaagtattggcctggtccctcaagggtcttcttcggaccgtatagggggtctccggctaaaggaaagccaatataggctaggtggaccctgatttggtgggtccggccggtctccagttggcactggatgagactatagtcttggccaaagtagcggataaggtcaaaatgggtgatggcctctttcccattctcagtgacggcatatttcttccggtcttttgagtcgcgtccgattggagcatcgatagtcccttttggatgagggacgtggccatgaaccaaggctaggtagtgacggtcaaccgtcttgtcttttaactgcttggataaggactggtgggccaggtcatttttagctacgaccaaaagacccgatgtgtccttgtctatccggtggacaatacctggccgcaattctccgttgataccagacaagttgtccagttggtataaaagggcattgaccaaggtatggtctgggtgacctaggctggggtggacgaccatgttttggggtttattcaccacagctaggtctgagtcttggtagacaatagggactggaatagcttcagcttctaagttaacttcttgaactggcgggatggtaaggactaccttgtcccctttggcgacttggtagttggcttttacagcctggccattgacggtcacctggtctgtttgaatcaagtcttgaattttagaccgggataaatcattgagttgatcacttaagaccttgtccagacgccccttttcttggtctatccggacttctcttctttcagtcatccttcctcccctcctttcatcatgtattcgtcgtaaaggactgctacaagcatcaaaataaccccagttgttagggctatatcagcaatattaaagattggaaaggacataaagtcaacttggatcatatcgataacgtactggtggaataggcggtcaataaagttacccagggcgccaccaatcataaaagcaatagccgttgccaggagggctgacttcttaccttccttgtggagaaggtagattaaaaaggccacgactaagatggtgacaaggtaaaaaaagaccatctgtccttcaaatatactccaagctgccccagtgttttggacatgggtcaaagacaagacattgggaatcaagtttatagtctggcctaagtctagattgctggctgttaaatacttggttaattggtcaagaatgataatgaccaagctgataaaataatattggatcatgctttaatagctccttttgtgaaattaatggccacaagtggtcaatattaggggaatatgattaacatcctaacttatttactgtagaatggaaataccaatcttacattacgaaggagtttgaacttgaataaattagtcaagacactggttagttcttccagcctttttctacttgctggatgcactaattatagtatatcaagcgtcagtgatacaacaagtaatcttcaagaagatagtcaggccatggtagaccaatttaatgagctctacgatacagaggctgacttaatggatacttttgaagaagaccttggatctgaagaaggtttagatcgtttcacaagtgaagatgctgaagtttttgaaaatgtcaaccaacggcgcgaacaagtggaaagtattttggacctcaaccaaagcatcactgaccaggctgattatttagcagattatgacggtgaggaactgaaccaagaagaagtccaagccttggctgacaacttacataattttactgaccaagttgaagcctataccgaccaataccaaactagtttagataaccaggaaactttcttccaagatattggctccgatgaagtctcgggggaagaatttctccaaggtctagaagatattgaagcagaggatgaagacttgaagaaccaagcctccgatttaaatgcagaatttgatcaaattttggaccaaatcgatgactttgcccaaagtgttaacgaggaagaaaacaatcaggaaggtgaaaacgaatgaaaaataaaatgaaaggcttcttacccctcctagtcgctcccctcatcttggtagcttgctcaggtgaccaagaagaccaagaaaatgaagcccaagaggaaaacactgaagaagtagaagaccaacaaggtcaagatggccaagaagctagcaatgaaagcgaccaggctgaagcggaccaagaagcacagtacacattaaatgaagaaagctttcggattgaaccgattgaaggaagcggagcggacagtcaggtggtcctgatgacctttgatgatgcgcctgacaattatgccttagagatagcagagattttgcatgaccacgacgttcctgctattttcttcgtcaatgctatgtacttggatgaccaagaaggccaagaccaactccaagccatccacgacatgggctttgaaattggcaaccacacctataaccaccccaacctgcaagaaatatctgaagaagcccaaagagctgagatcgttgataccaacgaccgagttgaagaactcattggggttagacctcgctttttccgcccaccctttggggctcagaccgactactcctaccaggtggctgaagaagaaggcatgcagtctatgaactggtcttatggctacgactgggagagccagtaccaagaccccgatgccctagcagacattatggtgaatagtgaattcttatccgatggtgctaacttgctcatgcacgaccgagagtggaccaaggatgctgttgaagatattatcctcggttttgaagaaaaaggatatgggtttgtcgaccctagtttaattgaaagtgggaataaagatgccgcataaaaaattaatcggctcgctggtcagtttcctaatcttgtcttcagctagcctccctgccctagcccaagaagaaagtgaccaagctgacgaaaatacagaagctgtccaagaccaagaaacagacggtcaggaagaccaagaggaccaagcaggttcagaaaatgaagaagatggtggtgaagaagctggcgatgatcaagaccaggaagtggaattggatggccccctccgcattaatgaagatcctatcctagccatccccaaaaacttccctcccgaattgtcttacggtcccgatgaagttgtagcctaccctgaagatggggttaaggggatttacgtaaccggcccaacgacagcagaagctaacttccaaaacttaatcaacatggtgaattccactgacttgaactccatggtgatcgatgtcaaggaagattacgggcaagtcgttttggattttgacagcgatagccaggccatccaaaatgccagcaaccccttttctgatgctgaggaagttgttgagacccttaaggaaaatgacatctaccctatcgcccggattgttgtctttaaagatacagtcctagctgaagaaagaccggacttatcctttacccaggcggatggaacgctttggaaaaatggccggggcgaagccttcgttaacccttacgagcaggaagtttgggactacaacattgaaatcgccaaggcagccgctgaagttggcttccgcgatatccaatttgactatgtccgcttcccagaaggttttgaaactcgggacgaagaactccaatacagtcggggcaaatatgatgactccactacaaattctgaacaaaggattgacaccgttaagagctttgtcgaacatgccagaaatgaactcatcccttataatgtggacgtttccgttgatatttttggctatgcagcagctatccaagaagcacctggtatcggacaaagcttccaaggtatttctgaacatgtggatgccatttcggccatggtctaccctagccactgggggccaggtaactttggcattgaaaagcccgacctagaaccttacagcactgtcgatgaatacatgaagttagaaaatgtcctcctcgatgaactgggcagtgatgcaccccaatccagaccttggatccaagactttacagctagctaccttggagcaggaaactacaaggaatatggtgcgcaagaagtcaccgaccaagtcaaggccctccatgataatggggttgatgagttcctcctttgggatgctagcaacaactactcccagggtgctacctactcctttgagggacaaacagaaaatgaaagcgaagcagaatagaaatgaaaagcctagctggaagttagcttccaactaggctttttgcttacctgctaaatggctttgctgaagccaatacagtatcatttttaaaacggccagtcagatgccaccttctggagtaaatgacctggattttaaaattctcgtataactaatgttgtttgagaaaaaagttgagagattctcgaataacaatagttgtttgagaaaagtccgccaaatttctcaaataatggttgttattttagaaaaccggtgaaaaattctcaaactagaccctcagtttgagaataacaaattttataattctatcaaaagcaaataacccaagctggaagcagaaacttccaacttgagtatttataatacaagttaaacttcaatggcccggttcaggtctgttgagaccaggtaggcatgactgacccgactatcaggataaatagtctctaaggctcgtttataaagggctatttgccccttgtagcgctctcttaagacttggtcgggatcttgatagtggcctagctggtcggtcttgtagtcaaagagggtaatctccttaccaacttgaacaaaaccatcaataaccccgtggattaatacactgtcctcttcctgggtatccaagtggaaaaggtcgcctgcttccaacaagagagaaaaaggctgttcgcgtttgacctgactggcatggtcttgcaagaaatggccaaattctcctgcgaataacttaaccagggagttttggtcgatgtaattcgccaagttttggtcgatcacttcctggttaaccagctggtctatgacggcttggatggcctgggctgtcactggctggctgagatcgcatttttgtaggactaagtgggtagctgacccgatatccttggaagaaggtttagcctggcttcccttttggataaattgggggtctgctaagtcttggctgacataacggttgggtttgctcccttgaccggtgaagtccatcttttccaatccttcatctacttcaaaaaagcgtttaatttcagaaacagattggtagctggtggtattaacagcaagctggtgggggtaatgataggaaagataggccttggcttggtccagttcttgcttaaggtcttcttcatcctggccccagtcttggctaggatttaacttagctgtttgagtgttaatatcttgactatccccctcccctggtccttggtcagggttagaactagatttgaccaagtcggcttcattgaagaagtgaatttgaaaggaaatatcttggaaagccaggagcggactgtccttttggtcccttaaatcttggctcaaggggtggcggataatccccttacccagccaattgaggaagccgtcatcgggcttgagcctttctttaatggacaaggtggtattcgtctgactttggaccgtcttccacttcttaaggaggtcttctttagtctttgtcgtaccggtgataaaaagcttctgttcagcccgggtcaatgcaacatagaggacccgcatttgttctgaaatcaactgccgcattcgtttagcttggatacccttgttgagccaggtggggtatttaagctgttggtcagtatcaatatagttgagccccaaaccttggtggctgtcgacagcatagtctccctgggcatcactgacattaaatttcttagagctatcggtcaaaaagacgatgggaaattctaagcccttgctagcatggatggtcataacacggacagcatcctcatcttccgtcacactgacaggttcagccaggtccttgtcttttttctgcatgctttcaataaatttaatgaattggaaaagacccttgaaggaagaagcttcataggcccctgctcgttcatacagggcatggaggttgttttgcctttgttggcctgactgtaaaccagccacatactctaggtagttggtgtcttggtaaaccttccagatcaagtccaccagggaatgaaatttagcatagtcccgccattcttccaactggcttaaaaagccttgaaccttgacctgcaagttagggtcaaccttgttcttcttggccttggcatagtcttctaaggcatggaagtagaggccctggcggttgatgagacggattttggctaattcgggttcggttaaacccaggaccatggaccgtaagacggcgaccaggggaatatcttgcaaggggttgtcaataatcttcaagatagacatcatggtcttgatctcggtccgctggaagtaattttcagtattgttaatagccactgggatgcccaatgccttaaattcttcactaatcaccaagttgttattcttggttggggttaaaatagcaatatctcggtattggagggggcggtttcggtctgcttttttgtcgtaaatcaaaaagccagaatccaccaggtccttaattttttgggccaccatccggtactgaccttggttactttcgcggatcccatcttgggggggtatctccccttccctatctgaatcttcccccttgctttggtagatgaggaattcagtttgcttggaatccaagtcatccgtctcattgggaaagtttgggttacccacatttaactgggcggcttgatcgtaaactacgtcgcccaggtcccggtccatgatttggtgaaagatatagttgataaagtccaagactgtattacgggaccggaagttttcctgtaagataatccgctccttgaccgggtcgtggccaaagcggtcatacttgtcaataaagagcttgggttcagccaggcggaagccataaatggactgcttgacatcccccaccataaagcggttacccgctcctggcttagccaggctggataaaatagcttcctggaggacattgatgtcttggtattcatcaattaagatttcttggaaaagatcttggtaataagcctgggccacccctgattcatggcttaagatatcgagtgtcttgtgctccaggtcattaaagtctaaggcccgcatcttttctttttcagctgaaaaagactggtggaattctaaaaggagttcaaccaaggactccaccaagggtcttaacttgttaatcttatccacttggtcactgggcttgatggtgaaatagtcttcaatgaggctgttaaaagcttttttaccactattatttaaagccttgacctcttcatccagggcctggtaatgggggtcttccttgtagtctttgggcagtgccggttttttaggaaatttcatggcttgaccttgtaggtaaaagtcatccaattggtctttttggactaggtcttgaaaactgactagtttttggcgaacttccccaaatttgtcctggaatttttcaaggccagcctccccttggaccaggtttaagatctggtcgtaatggtcgatagccaggtctaaactagagcggatgtctcctttaatttcatcctggtagatggaaaggtccttgaggtcatctacttggtaggtctggcccagctcactcaaccatttgatactgtcgggtctggccagggcagattgatagatagaccgaaccatgtctttaaaagggtccaagttactagggccagcaaacatctctagcaggcggtaaaagctagggttttggtcttctaacttcaaattgatgcagtcatctaatatacgctcttggaccaggtcgatttcggtttggtctgtcaacatgcggaagactggatccatatcaatcaaatagtaatatttttggataaccttagaacaaaaggagtggatggtggaaatattggcttggttgatcaagggtaattgcttaattaggtggtttttaaggttactgccagatggggcctggctaatttggtcttggatcttggcctggatccgttctttcatttcctgggccgccgccttggtaaaggtcactaccaataagtcggtaatatcggctccttggctgactaagttaaggatgcgttcaaccaagaccatggtttttcccgaaccagccgaggccgaaactagaatatcatggccagtatggtagatggcttctttttgttcaggtgtataattaggtttagtgtcttgggtcatggtctcctccatctttttggtagagtttttgcaaatgggctagatagtcttccatcgaatcaaaggttgttaagtattggtactggttttctgctagcaaaacatcaaattgggaaatagcgtggtagggccctgaaacagtatcaatatggtccactccataataaggtttcatcactaacttgccagagaggatgtcttggccagctttagcgattaattgccggttgtggtggagcaacaattccaagtctgctggtttaatcaattggttgggtcttcggattgaaaaactaccatctttctttttcatgtagggatagtagtcagaataaccattagtgtcttgtaggttcacatctagtaggtctaatgctttgggttcatccagcaagaggccctggtattttaattccttattgattttttggtttaggtcggcttcatttaaaagcttgtctaccatgattttaggcatatggatctgagaataaagggcagccaggggttttaggcctgctaagtttaagtctagctggtcataatattttaagactgtatcaaagtaggtcaagagttgcaaggacagaccggcatttaattcacttgccttaaggctttttttgctggacttgtagtcgacaatttgcaaatacttgtggtcttctccccgatttgggtcagacatcaagtccacccggtcgattttaccccgcaagtaaacagtggactggtcacttaaaggaatttcataggctggcaggctggtgtcagacgagcccaggccaaagtttaattcagtcaggtagggccgcatatgggaggactgaaagtgcttgtgggtggatttaagacggcggttaacatttttaaggagttggtctcttatgaaagccatctgattggaagctgatagaaccttgtagcgggggtcttctaacaagtttctggctcggtcttgggccaagtcttctaggtcggccgggtctatgtctgccagatcttgcttggaggcgataacttcactgatgacctggtctaagatgtcatggtagtaagaaccggactctgccggagtcaattctaattggtctcggtcttttaatttcaagccgtactgcaagaagtgattgtaggggtccttatagtaggtctcaagctgggagacagacaagtaaaggtccttaccgtacaagtcttgggccagtttttcccctaatgggactgggatatttttaaagtccaaggatgaaaaaatccttcttaattgcccctggtcttgggcagccaagtaagttgccagcttggcccatagggggtggagaggaatttgcttttccctgtctaagcggaaagccaagagggttaggttggccaattggtacttggaagccaggacttggtctaaatctttcggatgggggtcctggattaagtctcctaaccttccctgctggtatatctcaaggtcaaaggcctgctgaacttgtttgagatagggactgagactatggtctgaagccccatcttgtttttgactatagctaaagaaaaggtactggctggctaggttaaaagccttgtaagctgtataagcttcgtcagccaacctttcctcactactagaccgcaaattttttaaaggattctcttggaggtagtcctggaagacttgccggtcttggtcgtctaaaatactttggttgtcaatagcttggggaaagttactttcgttcatgccaaggtaaaagacgatgggatgacggctggtccggtcccagtccagtcgactagtcaccgtaacctggtccagccttggtggaacgttagaaaattccgtgctttcaaaggcaagctcaatcatggcaagaaattcttccccgtcccatgggtagtcccccattacttcaatatattcatcaaaaagggagataagactatgccaggcctgctcgtgacgcttagactggtctagatcttgggcttctaaggcctggtcccgccaggctaaaattcggtccttcacctgacatttttccataaaatcataaatagctagcattgcctgtcggttggttatgtggtcttggtttaagcttttgatcaaggggtcaaacaagcggtggagttgacttctgacctggttactggtttcttggattcgtttttcttctagactttgctcctggtcttcccttcccctactgatccggtcataaacccaatcctcacccctggtccaggccggtccttggtaaccataggctaagaggacgttttcagtttggtctaccttggcccgccaagcctttggactggtggttttttcttggtcatttggcaagtataactctgaccgtaaaaaacgcatgacatctgggtactggaagttgtagaggacgattcggatggcagctagcaaaaattccacgagggggtgctggctcatggaatctgttaggtcaaagaagacgggtatcccttcttggttaaagataggaaccaagctatttttgtaatcagagagatcccgacccactaccaaaatatccttgtaacggtaggaagcagaagcgacaaattgcttgattttattggctaggtagtggacttcatcttggatagttaaaacttcagtaatctgaacccggtctttcaattggctggactggactggactacccttctggttttgactataagttcgataccaatagtcttccaagtctaaaatgccgggcttaatccctacttggtagccggatgggtcaatatagtctgtttggatagctaggtctgggatggtctgggctagttgaaagacctgctggtaggtcttgcccgactggtaaaaaatatctaggagggggggatagttattagggtaagccttgtccaggtttaagtagaggtagacgtctttggcattttctaagagggcttttatcaagtccatctcctggctagaaaaactgtcgtaatggtcaatgacaaaaacagtttgggaaaagtcatgacctttaatataatcgactagggtctttaaaatatcttcttggtctaagtatttttgactcaattcctctaaaaatttggggtagattttttctaagtcagccagtttccgaaagctttgcccctcttgatccaactgatcctttatttgggtcaggtcctcagcttcgatcaaacccgaacgaaattccaagaggaggtcggtcaacttactgataaagcccggataggcctcttgtccttggtaaactaggaggtctaccttgtcttgctttaactccagcattatttttttgaccatgaccgctagacctgtttgggataggcgagtccggttaaccatggccgaatccgacagcaaggcccaagcaagccgggtaaaactgtaaacctggactttgatcatgccagctgctttggcctggcttttctctttgaaaaagtctaatatattgacttctgattcaaatttgaggtggtcggggatcaggtaataaacctggtctaaatcttcttgctgaaccaggtcaaatagttgctgggccctgacctggtcctggttgagccggttccgccctagcttgaagtgtagtcccatcttgagccttctttctcttagttttcatttttaccagacacagccaactgggcaatttttaagatgacttggcaggctttttccatgctttctaaggcaacaaattcataacgaccgtggaagttttctcctcctgcaaacaagttgggacaaggcaaacctctaaaggaaagcttagacccatctgttcctccacgaataggctcgatgatggggtcaatatccaaggcttccatggctttttgagctaagtctactggggtgaggtcttttttgataatgtcagccatattgtaatactggtcctccatgtcgacaaagacccggtccttgtctagtgttttattcaattcctgggcaactttttcaatataggcctttttctccttgaagagtttgttgtcatggtcccggataatatagactaactcggcttcttctacccggccattgagattggttaagtggtagaagccttcccggccattggttttttcagggacctggtcgtcaggcaacttgttctggaaggcccgggctaactcaagagcgttaaccatagagtctttggccttgccggggtggacatttttacccttaatagtaattttagcctgggcagcattgaaactttcgtattgcaattcacccactggtcccccatcaacggtgtaggcaaagtcacaagggaagttggctaagtcaaacaagtcagctccacgcccaatttcttcatctgggccaaaagctagccggatttccccgtgtttaatatctgggttatcaagcaaacgagccccggcagtgacaatctccgccacacctgacttgtcatcagaccctaagagggtggttccatctgtggtaatcaaggtttggcccacatagtttttcaagttagggaattcacttgggtccagggtgatgtcctcttcttggttaaggataatggggtggccatcgtaatttacgtgtttttgcggttggatgttttcggactcgaagtcggccgtgtccacatgggagataaagccaatcgttggggctggctggtctgtattggccggaattctagcagttaaataagagtctttggggtttaacctgacatcggcaaagcccaagtcttttagctcaagttccaagtcttttaaaaaatcggtttgaatagaagtcgatggaacactagtgctggcttcatttgaccgggtattctttttaacgtaggaaaggaatctttcttctaattgctttgacatagtataacctgctttctttacttggtatagaattcgaagggttcggtattgacctgagattggaccacctggatgggccacttgtatgcttggatccattcttggactttttgggccagtttggggatgcagatggcctcgatatggtggccggggtcaatcacggttagaccggcagcctggaggtcatgggctgtgtggtaataaacatcaccagtgatataggcatcagctcccgaattgatggcatcttggataaaggaagacccatctccaccacagatggctattttttggaaggttttttgcttggtattgggaacttggacatatctcaagccttggaggtcaaaactttttttgatatgggccaggaggtcttccagggtcataacttggcttaggtctccaacccggccaattccctgacttttacaattcccttccagcttaaagacatcgtaaacgggttcttcgtaaggatgggcttcaagtagggccaaaatgacctggtccaaatcgtcttcgtctaccaagacttcaagccggtcttcctggacttcttctgcctgatcaacctggccaatagctggtttggcaccagctttaggggtaaagcgacctaaagcagggatagaagtagaaacatcctggtagaagtctcccacctgtcctgctcccttgtcatggcaggccgataagacttggtcgctcgcttcttgggggacataaaccactaatttgtactggtctgcctggtaggtcgggcttaaaatttggagattggtcaggtctaaggcgtctgctagccaatcgttcattccaccagccacgacatccaaattggtatgggaagcatataccccaatattgtggcggatcagctgggcgtacatatgattttgaggatcatcttccaccagggttttggcaggcttaaagataggagggtggtgggccaagataaagtcgacccccctagccacagcttcatcgaccacttcaggtctaacatctaaagtagtcatgactttagtgatttcttggtcagggtggccaaagtgaaggccggttgggtcccctcccatgattaattttttaggggcaaatttttcgtaaactgagacaaattccttaatgctggtcatggttgagtaattcctccaattgcttgaccttttctttgacttctttcacccggtctgcctggtcccctttgctttgttggacctgggccaggatttttgaccacttatcaaattctttttgccacttttctatggctagttggggtggcttagtgtggtcgaagaaaccatactccaagtcgatttggctataattaaaagcttcctgggccttactagctaaaataatggagtaaataatccccttgtcttttactaaaagctcgcagtcaatctcgtagtggtggtcaactagccattttcttaagccaggctccccattgttggcttgaaggattagcttggcctgggccggtaacttgcccaagtctagtccctggtccaaaattcgggtgattaaattcccccccatgccacagatggtgatcaagtccaccgggtcctcatcttgtaaaatacttaaaccgtcccccatccggacctccatgacctggcttaacccagcctgggccacttctttttgggagttttgtaagggtccgggggccacttcgccagctatagccttacccacccgattattttggattaagtaaattggtaggtaggcgtggtccgaaccaatatcagccaggcaagcggtgtctagggggaccaggtcagctataacttgcaaacggtttgataattccataaggtcatcctttaattttatattttaatgatagcaaaatgtcaatacaaatgacaatatcccacctgtcagagttgggaatttaagtacaaaaaaaggaggggaccaccctcctcttgttcgtgtgacttattaggccattactcttctgagtcttcctcttcatcttctttttcagtaattacttcaggttcaggcatatctgcttctgtttcaccttcatcactttgttcaaggtcatcagaaacatcatctggtgctgagatggacaagacggttgcttctaattcgtctaagatctcagcatcttcaggaacgtcgatgtctgcaaccgttagggaatccccaatttccatccctttgacatcaacagtcaattcagatggggccttagcaggggcaatttccatttcaatctcagagatagattgggaaacataacccacttcgattgactcttcaccttcaacataaacagggatagacatagcaactttttcccctgaagtaaaggcaagcaagtcaatgtgacgcaattgaggtctaaaggtttcataaacagcatctttaacaaagacctgtagtttgtccccgtctaagtcaatttcaaagacaccgtttgacccaacttctctcagagtatcttctacatcttttaattttaataaaattggggttgaatccactttcgaaccgtagacaacagctggtaggtaaccttcttgacgtgcttttttggaggcactagtaccagtttgtgtacgtttttgtgcacttattttcatacatttcaccttccaaatcatcaaaataactgattagtcgttaaatttcagtgtgttttacaagccaagagccattatagcaaattatagctagcattgtaaagcattttctggtttggatcaactattctaaaaagtcttttaattgtttggaccggctagggtggcggagtttgcggagggccttcgcttcaatttgacggatccgctcccgggtgaccccaaagaccttaccgacatcttctaaagtacgttgacggccatcatctaggccaaaacggaggcgcaagacattttcttcccggtcagttagggtgtctaagactcctttgagttcccctttcaacagctcataagctgcattatcagatggcgacaaggccccatcatcttcaataaagtctcccaggtgggaatcttcttcttccccaattggggtttcaagggagacgggttcttgggaaattttcaaaatatctctgactttttcggttggcaaatccatctctgccccaatttcttctggggttggttcccggcctagttcttgtaggagctgccgctggattcggaccagcttgttaatagtttcgaccatgtggaccggaatccggatggttcgggcttggtcggcaatggcccgagtgatggcttgacggatccaccaggtggcataggttgaaaatttgaaacctttttcgtagtcaaatttttcaactgccttcattagccccatattcccttcctggatcaagtccaaaaagctcatgccccggccaacgtaccgtttagcaatagagacaaccagtctcaagttagcctcagctagttcttgtttagcgatttcatcgccttcttcaatccgcttggctagggccacttcttcttcagcatctaaaagatctacccggccaatttcttttaggtacatccggacagggtcgttaattttaaccccaggtggggctatcatttcttcatccttggctttttctgcttcttcttcctgcttggctagttgcttggccaagggattaccgtcttggtcaactacaccaatcccatcatcttctaattgctggattaacttgtccatggcttcactttcaagttcgaagggttcagcaattttgttgctgaggtcaatataagaaatggtcgactcttttttatttttcaagtctttaatgagggtgtttactgcattttctagttttgattttgtctcaaccactaattattcagcctccaattattgttttagcatacggtttatttcaattaattgattggttaattccagctctcgcttcttattaccggactgtttagctgctttgacttcctccaagcagtcttggcgtttttgctccagggggtaggtttggtcaatgtagtccaagtagtctaggatttcttcatctgagggttcgacctcaatggatgtccacattatatcagatatgacctctttcgtctccttgtctttgacaaaatcgatgaaagaatcaatgctatcattttcctggctgtattctaaaaacaagaggtaaatccgctggtggacttccgttttaaattcaaagtccggattataagcatcgatgatctcttgaacttggggatagtaaaagagtcggtttaaaagtttttcctgggcccggtcaatcttagtcttttgactacttggggctttgacttccactcttgcttgagaaaattccttatgccggtcctttttcaaagcctcttgctggtttagagtggcttcactttgaacttggcttataatcgtatcataagacaggttaaattcttctgccaaatccttggcatagacttccctttccaagggggaagctagcttgccaattttattggtcatggtttggataaatttcaaccggtccgagtcgttatctagattgtaggattttttaaagtattcttttaagaattggtagacagtcatcctaccatgttggatgagattttgaaaggcttctggtccattttctctaatatattcatccgggtccatttttttagggaaaatgaccacttcaatttgaagcttgctggtcaagcttaagtcatccaggatctttttgctggattcaaggccagcttcatccccgtcaaaggccaagactaaggtgtcagcaatcctttgcatggtctggacttggtcagctgttatactggtccccatggaagctaagccatttttgacccccgcttgccaagcagcaatcacatccatgtaaccttcgaataagacaacttccttggcccgacgaatgtaggccttggcctggtggtagttaaagagggtccgccgtttattgaatattttggtttctggactgtttaaatacttggcatgatggaagtcctggttaggctcatcttggaaataccggcccgaaaagcccaccgtctgcccttgtaagttctttaaggggaagatgatccgcttggcaaagcggtctttaaaactatcactttccacttctcttttggaaaaaaggccggtttcttccagtaagtcatctgtcaagtccgcctggtcttgggactgcaaataaaggtggagcgactccctttggctgggagaataacccagttcgaactcttccatcacctctctggaaatcccacgattctggagatagtcgtaagcaacttctcccacctgggcctttaagaggatatactggtagtagtccttggcctggtcatggatggtatagaggtctcggtagggagaatcggctttgtcaggttggccttggacagcttcttttaaggccggatcaaggtccacattagctaagtctgccactttaagaaccgattctgggaaggaaagtccctccttctcttgtataaagctaaagacactgccacctcgtttgcaagaaaagcacttataaatttgcttgtctctgttgaccgaaaaagaaggcgtgctgtcttcatggaaggggcagtgggcaaagtaattggccccagacttgtttaagtccaagtattggccaatgacatcgacaatatctgcctggcttcgtatttgattaatggtctcttcaggtattctaaccatttaaaactccttttagccaaaacaacattacacagatgcagaaacatctaaaagttgcaagatttcatctttggagagactggtaatggcctggttgcctttggaatcgatgacggagtctaccaagtcccttttcttttcttggagttcgttgatccgctcttcgatggttcctcgggcaattaaacgcaagacttggacgtgttttttctgaccaaagcggtggacccggtcagctgcctggtcttcaatggccggattccaccacgagtcatagaggataactgtgtcgcctcccgtcaagttgatcccggtcccccctgctttcagggaaataaggaagaggtccttctctcctttattaaagcgatgggtgaggtcgagccggtcttctttcttggtttggccatccaggtaaaagtagtcatagtcattttcagcaagccggtccctgattatatctaacatcttggtaaattgggaaaagaggacgattcgcttgccattttgcttagcttcagctaggtattccatcaagcggtcgagcttggctgaatctccatcatattgcttagtcaccaggttagggtcacaacagatctgccgcaatcttgtcataccagccaggacttgaacactattgcgttcaaattcattgttatccaacagttcttggacctgggactggatcatggcctgttgggtctggtaaatttgtttttgctttttgctgagttcgatatattctgttgtctccgttttttcaggcaagtcatctaagacctgacctttgagccggcggaggataaagggcttgatctttttagcgatgacggactggtccatctgcttaaagttcttcttatcttggaacatgcccggttggataatggaaaagagggtccagagttcatttaaattgttttcaattggggttcccgacaaggcgaacttgttcttagcctgcaggcgggcgacagcccgggttgtcttggccgaatcatttttcaccgcttgggattcatccaggatgatggtttcaaagtggataccctggtaaaagtcactgtctcgttgaatcaaggggtaggatgagatccaaacaccatttttcttgtctttgacctggtcgatgacctcttcccgttcttgggccgtcccggcaataacagttggttgaatttccggtgtgaactggttgaactcgtactgccagttgtataagacactggatgggcagacaatcagatacttgccccctaactcgtttagcttggactggataaaagtaatggactgcagggttttacccaagcccatgtcgtcagctaaaaccccaccaaatttgtaggcatccaaggccttcagccagttgtagccagtcttttgatagggtcttaaatcagcctggacttggtctgggacctcataggaaattgatttgggttccagaagggacttggccaggctcataaactggtcacttttgtcgacattattgttttcaagtagcgacaagccttggtagagggggatattaaaggagtttgagatgtcatcttggtccgggtcaagcgataagtcgtctgccacttccttcaattctttaaactcatctcgctccaagtctaaaatagcaccagacgacaacttgtaaaaacggtcattgcctgccttcaactgggtaagaatttgtttaatatcatcgctagccatgtcttccatttcaaaatcaacttggaggaggttggcatcatagtccacatcgatggaaaccggcttatggttgggtctttggtagtaaagcttgcggacagcatcggttaaatagaggtcaaaggactcaaagagctggcccataccgtcatatatggccttactaactgcttggaagtcactgatagcaaaatggtcctcttcttcttctaagccgtccaagacctggtaaagcaagtcaaggaggctggcttcttctaccgtatctcggattaagacttgtccctccccagcctggtcagtctggtttactatggggttgacggtcacttggccgtagttaaaacggggttctaagcttaggaccttatttttataatcgatatacaaggcagcagttagttctttttggtagatggttttttcaatatcaggatcaagtgctaggtcaaagtaccggctaagagtaggataaatcgtggacatgaagtggcttaagtcatcttgcttcatgggaatttcattggtgtgcaagccatggaagaatttaaccaaactatagagaacttggtaatcttcctgtgacaggtcataaaagacgtggtcataaaccaccaagcgactttcaggaaagaaggaaatgggttgggtattcatcttgataccgtccatattgaaatagtaatggctcccttcccttgtcaaactgaagtcaagcgggaaatcagctaggctgttagaatattgtatgggctccaagtctctgatagcagtgatggaagtcggtgaactgccaaagtgggcagaagcatggtcaacctgtctcagtcgacgcaagagccgacccaccatttggttaggtatcatcaattcatttttatttgtgagcgactggtagctagaagctttaacttgttccatattggcatggatatcggctaattcctgcaaaacagcccggtcttctggggcaatgaagtggtctttatagtggtaggttaagtttttaccaaaaacatagtcatcgttattgagaagggtatggaccaagtctggcacatttttaataacgtacatatggtcaatccccaccttcatataaatttcaaaggcattctcataataatagggactgacattgaggataaagtcaaaaaagagccggttacgacttctagaggaatacttattaatttgtagtttttgaaaatcttcctccaggtcagctaagtaggaatcgagctgacttttcttacctgctcttgggtcttctttggccggctggtcttggtctgaaagatcgatttggtttaaattcaacatactggcaatgacatgcttgcaagcaccagcatattgttcaaaggctggacaggtacagtggtaacgtctggctaccccattttttaaaaaactgatctgggtagtgtaatcgtcttggttgccatttacatctgatatagctaagtggttgtcctcatcgagttcacaagattccactcgaccttcttcaaagagtctgacgccccggtcatagacagtcgagttggttgccaaagatcttagagttgcctcaggaaaaaactgttttttaaacactcgcttcagtccttatctcttattctcatccattaattatagcaaggaatggcttgaaagccaatcatatggtttaaaatcaacctgtagtcatgacttaaattttcaaaacctaactaaggcaaacagacaggcaaaaccaccccggctcttaaaaagcacaaaagctaggatggtcttttcaatcgtcatggaacacttacttggtcaataattggttaaagtcggcaaagctgtgcgaagcttgggtgatctgatccaagatcgcatagcggttagcccggacctggtcgtcttcagtgttaaccatattgttgtcaaaaaaggcttcgattttcggactgatctccttgagggcttcatactgggcagtgatatcatctgattcttggaacaagcccaagaggaagacggaagccttgattaagtcttcttctgactggctttgggccaggtcagggtcaacttctgcatggctggtttcttgctgcgtcatattggctacccgggacagggattccaccataaatttatagtcttggcttccccggtcttctgccagtttttgcccgaccttaatggccttgactgggtttaagtggaggccactaatggcagcctgacgaatatcgtgggggatttggtattgggcttcaagatacttatcaacccgctccttgataaactggtcaagcttttcgataaagtgagtgtcttctatcccaaggtcttgggccagctggtagaaaaagtccgttaaatcaagtgataagtcctggtcatccaagatccggatcaaaccgtatgctgcccgtcttagagcgtaagggtcatttgacccacttggaattaagttaatgctaaagaacatcaagagggattccaacttgtcggccatggccaagatggaaccgagcttggactctggcaagtcgccccttgaactggttggcaaatactgttccccaatggcctgggcaaccgcctgagactcgccaaattcttgggcatagaccccgccgatatagccttgaagggaagaaaattcatcgaccacagcggtaaccaggtcaaatttatagatggctgctgcccggctgaggtcatctctttcagcttgggtcaaggagacatagtctaggaggtccaagcaaatctgacctacccggtcctgtttatcctgcatagaccccaacttgtcgtggtaggtgacctggtctagctggtttaggaagtagtcaatggagtggtccttatcctcctggtagaaaaacttggcatcttctaaccgggccactaaaactttttcattgccggcaacaacattttctaaaccagcctcattcccattccggaccccgataaagtagggaaggaagtcgcctaatttggaccggacagggaagtaacgctggtggtcagccatggaagtctctaaaatccgctccggtacacttaagaaggaggagtcaaattccccgaaaaagacggttgggtattcaaccaggtctgtgacttcatccaagagggcctggttgtagaggggactttgccagtttttgtcttggcacaaggcttcaatttgtctagcaatatcttcttgccgatcctgtctgtcggcgataacatattggttctttaaggctttttcatagttctcggctgaagccagctcaagagtttcccctagaaaacggtggccatcagtcttccggccgctggacacgttaaataaggagctgtcgataacctggtcgtctaaaagacagactagctggtggacgggtctgacaaagcggaagtggttatcgccccacttcatgctgacaggggccgtcaatcctgaaactacttgagaaatatcttctaagacctggtcagccttttgacctggtcggaatttttcaataaaggcatagtcttggcccttgtcttctttaaagacaatatcgtcggcactcatcccctgccccttagcaaaaccaagggcagccttggtccactggccgtcttggtctagggcaatcttcttggccggtcctctgaagctttctgttttgtcctcttggctgtcagctaaatcccaaacttgaactgctagccttctgggagtggaataggacttgattttgctgtaagccaagccttggtcatttaaaaattgactgaccaaattctttaattgggcttctaagtcagtgatgaaacgggctggcaactcttctaggccaatttcatataaaaactggtgactcatcttattcaaaccttccttcatacttgtctaaccactcttgtcgcttgtcatcttctattaaaggaaaagagagcttgtagcgttcggccacaaattgtttggcgatgctccgagccatattccgaattcgtttcaggtagtcagcccgctcaatggctgataccacccctctggcatccaaaaggttgaaagtgtggctagcctttaagacatagtcgtatgcggggtggactaggccagcatcaattaagcggagggcctggttctcattaaccttgaattcctggatcaagacttgggggtctgactggtcaaaggaataggttgagtgttcaaattcagcctgtttaaaaatatccccgtataaaacgccctgggtccattccaggtcatagacgctggccacttcctggatataagaagccaggcgctccaggccataagtcaattcgacagtcacccggtccacttccatccccccaacttgctggaagtaggtaaattgggtgacttccatgccatccagccaaacttcccagcccaaaccagcacagcctagggaagggttttcccagttgtcttctacaaagcggatgtcatgggccaaggggtcaatccccagagcttctaaactttttaggtagaggtcttggatattgctaggagacggtttcatgaccacctggaattggtggtgttggaagagacggttggggttttgcccgtaacgtccatcatcgggccttctggaaggctccacataagcggcattccatggctccggtccattactccgtaaaaaagtgtaaggactcatggtccctgcccctttttcggtatcataggcatttaaaataatgcaaccttgatcagaccaataattctgcagtgataaaataattccctgtaaggataaagcttttgtctgctccataatcctatcctttctaataaaaaagcccctataccaactcttggagtcagtatagggacgattattcgcggttccaccctacttctagcaacagtcgttactagcccttgattagtactcgagaggcctttcgatataacaagctttgcctagcttccactcatccaggctcgctttgaaagctcattagtctacttcttctgtcatcgtacttgcttattgaattaacttcattgtactaaatcacaagaaaaagtcaatcaccatctagcattgacccccattttttcatctgcttgataaattttttgctctttaagcggactccaaccaagtcctcatagatggtgtcagtcaatttctccaatgaggccttaatctctggggcaattgtgatgctttcaatattttttaagttgacttgcaaaaagttttggacatggtagatggttttagggtggagttgcaacctgtgggcatcttggtccaggtggtttggacaaagcaggccagcataggccccagaataatcaaaggggccttggcttttgccacatacttgacaagtgaaaaagtcaggcattaccccaaaatagtagagaagtttgatttcaaagataaacataatgacttctgggtctatgtcagcttcgatcttacttaagccgtagtaaagctggcggaagagaccgtctgctggttgccggtctcccatacaggcatccaccaaaccacaaatataggtggcataagcatttttaaaaatatcttgttggattaagctaaaagcttgaacagacttggcatcccggataaaagacagtcctgtctttctaatatcaacaatgtagcgcccggctgtaaaaggttggatcaggctagccatggaccggttggggtttttggacccccgaacgtaaaacatcatcttgccgtaatggtttaagaagattttaaccaggtagtctctttccttgtacttgcgcttggataagacaagcgcctggacttcttttaattctgccataaaatcccctaatagttgtcttcattgtagccaaagtcttctaagcgactgggcttgtcccgccagtctctttggactttaacccagagttccaagtaaatcttatctcccagtagtttctcaatatctcgccgagctaggctaccaatttttttaatcatggacccttgcttgccgataataatccccttttggctcttgcgttcgacaataatggtggcataggtttggactttaccatcttggtttcggtctaccttctcagttactactgctactgaatgaggaatctcttctctagccaagtctaaaaccttctcccggatgagttctgaaataataaagtattcggggtggtccgagacctggtcgtccgggtaaaattggggtccaacaggtaggtaagacttgatggtttgaatgagctcctggatattttccccttccaagcctgaagttggaaccacttcggcaaagtcgaattcctcttggtagtcgctaataaccggtaggaggtctgttggatcgacctggtcaatctggttaataattaaaaaaactggcgtatcgatggttcgcaacttgtcgataatgaaccggtcccccgggccaatcttttccctgacattgaccacaaataagaccaggtccacctcattgatggtcgacatagccgaatccaccataaaccggcccaggcggtgcttgggtttatgtataccaggtgtgtcgataaagacaatttgccccgcttggtcggtgtaaataccctggattttattccgggttgtttggggtttgtcactgataatggtaatcttctggcctaatatttggttgagcagggttgacttgcccacattgggccggccaagaagggtgacaaaacctgatttaaatgttttgctatctttgttttcattgttttcattgttttccatattccatgtcccctggcttaaagttgtccggtaatagttgtccgattgtctggcttacccaatcgcccttgctgttgaccattaaaacaggcatatccgactggcaaaattcgctcatcacctggcgacaagccccgcaaggtgtaatgggctggtcggtttggccaatgacgaccaagtagtcaaattggcggtagccactggagatagccttaaagatagccgttcgttcagcacagttgctgaggccataggaggcattttcaatattgcatccagcaaaaatctttccctctcgggtcaaaatggctgctccaactggaaaatgagagtaaggtacataggcctggtccaacatgacagttgcctgtttaatcatttcttttactttgtctccatctatcataatgggtcatccttttaaaaaactagggcgatcaacttgggtaaaaagagaaagaggccaataaaaacggcaaaacctgctgcaagcagagccaaacctgctgccaaatccttgatctttttggcctggggatggtagttgggcatgaccaagtccacgatattctcaacaatggtgttggtcgtctcagccgagatcacgctaaaacaggcaaggcccaaccacaaaaattcaggccctgaaaaagagaaaagaaaagctaggataaaaaccactaaactagccaagagatggaagcgaaagtttcgctcctccttaaaggctgtgactaagccctgccaggcatagttaaatgactggcgaaaactattgttcttattcggtccggccattagcgcccaaccccaaattcagccaagatgttttcttggagttgaaacatttctcttcttcagcctggctgtggtggtcatagccattcaagtgtaagaagccatggacgaccaagaaggccaattctcttctttgggagtgaccgtactccttggcttgagacttaaccttgtctatggaaataattaaatcccccaacataaggtcaaaggcttgtaaaggggccatatccatttggcataaggggtcgtcttcgataacatcccgcatggcaaaggagataacgtcagtcgcatagtccttgccccggtagtcccggttaatttgccgaatctcctcattatctacgatggtaaccgacacctcaacctggtcacttaagttaagatactgggccgaaaaaaccagcaaatcatgaaccaagtctcgaaaatttgaggatagggcatcgtttttatcgataatttcaatctccatttcctagtcctcttctttctcctggctttcttcatcggttacttgaccttttttatggcggtcataagcttcaataacccgagtaaccaattggtgtctaaccacatcagctgtttcaaatttaacgtggccaataccctgtgtctgcttgagtattttatccgcgtgaaccaaacctgaagttactcctctcggcaagtcgatctggctgacatccccgttgataatcatcttggacccaaaacccagccgggttaagaacattttcatctggggaatggtggtattttgagcttcatctaagatcacaaaggcatcatccagggttcggccccgcatataagctaggggggcaatttcaatggtttccctttccatcaagcgattggtatggctcaccccaaagatagcaaaaagggcatcatacaagggtctgaggtaggggtcgaccttttctttcaagtcccctggcaaaaaacccaggctttctccggcttctactgctggacgggttaagatgattcgcttaacctggttacgtctgagggcttcgactgccaaggcgacagccaaaaaagtcttcccagttccggcaggtcccaggccaaagacaatgtcgttgcgactcaccgtatctacataccgctgttggccaacatttctcacccggataggcttgccgtctacgtctcgaccaataatattttcgtacattttaatgaattggttaatctgcccacttttagccaaacgaattgcgcttaggacatcggactcggtaatttgactgttcttttcatacaaaaattccaattgggaaatgatctcacctgccaaggtgacccggtcttcctcacccttgaggatcatcttattacccctagtggagagggtaatgtccagctcttcttccaccaaggctaggtagctattttgggatccaaagatggcgatagccgcctcgggatcctcaaatgtccttaccgattgatatgtttggtctgtcaaaaatgattcgctccttttatcaatattcccccctataatagcatacaaaagggggccttgccattttggtggtgataaaaaggaaaattatttaaaaatcttgggataggaaaaggaccaggttagcctggtcctttcgatctatgataagtattgtttgacaattgaattgacctggccaccatctgccctacctttaaccttgggcatgatggctcccataaccttgcccatgtcttgcatggacttggctccagtttcctggatggtttcttggacaagttggtcgacttcttcatctgttaactgctctggtaggtagcggtcaacaacttccagttctcctttaacttggtccaccaaatcatcccggccagctgactggaattcttttaaagaatcttggcgctgtttcttctcgctagagataacagcgatctcatcgtcttcagacaagtcagcctgcttgttcaattgttctttttgtagcgatgatttgagcatccgaatggtcttcaaggattctttatccttagccttcatcgcctttttcatatcatcgtttaattgttctagaatggtcaagacgatctccctcgctacttattcacttaacgtcttctgcggttacgttttctagcctcttcagattttttctttcgtcgaacacttggtttttcgtagtgttcacgtttacgtgcttctcttaacgtaccacttttagaaacagaacgtttgaaacgacgaagagcgtcatcaatggactcaccttttttgacatttgttttagtcaatgcagttcccctcccctcgttcgttcaggtagttccgtttgcagatgaaaacacatttcattacgaacttccttaccttgggcaaaagcctaaaaacaatattaattgaatgattattcaattcaagtttcattatataaaacatgaccaaatcagtcaataacggcttcacttattttttacatttttcacaaaaaagatacgcctaagctagctattgatgggcttaagccggactaagatgcctgatggttgagtttttgattacatttttcacacaggccgtagacttcaaaacggtgggactggatctcacatcctgggagttggacctggaagtagtctagggggcaggcatcaatttccctggtctggccacagtttttgcaaataaaatggtggtggtggtcatggacatcacagtgagaccgaaagactttttctccttttaactcggtcttctcgataataccgaggtcataaaaggtataaaggttacgatagatggtgtctgggctgatcccctggtagtcttggctcatcttggcctggacgtcactagctgacaggtacttatcttcatcatagagaatttcaaccatcctttttcgtttggaggttagttttaacttgttgtcttttaagatgtcaagtgcttcttcataagttgtcaacttctccaccccttctagctcatgtattcagctactacttattgtataattatactaggttcaagacagaaaaacaaaggaggatgattcaatgaaccctggtcttatcatctataccctttccgattcagtcggcaatacggccatcaatgtagccaaaagtgctctagcccagttccctagccacaaggtccccattaaaaactttccttttatcaaagacgaccaagaactcttggctatcctaacccgggccaaagacagggaagctatggttatctataactttgccaagctagaccatgtcagcttggtggagagctttcaagaggaacatgacctctttgcctttaacctcctgacccccttgaccgaatacctagcagaccggattgggcatgcccctagccaagaagctggggccaaccaccaactaaaccaagcctacttcgaccggatcaatgccatggaatttgccgtccaatatgatgacggccaagaccccaatggttttttgcaggcggatattatcttattgggagtttcccgaacttccaagacccctctttctatttacctggccaatgaaggctttaaggtagccaacctccctgttatgccggaatccaccattcccaaccaaatctatcaggttgacccaaggaagattattggcctcaccaacagcaaagaccttttactggccattcgcaaggaacggatgcgggcatatggcttggatgacaacatgctttactctacccaagagcgaatagaggctgaactggactttgccaaccagctctaccaagacctgggttgcttcaccatcaacgtctccaacaagtccatagaagaaacaacggccatcatcaaggactacttaagccaggaagagtaaagggacaggagtaaagttgtacaggcaattaggtctagcaaaccattaaaataaggcacaggacttgtgccttattaaagtctattggtctggtttttctttagggtcttttaaaaagaagatcaagatcatggctaggattgaaaatatagccaccaagataaaggcgcctcggactcctgccatatttaagtctgtcggaccgccatcttggaaaacccccaccgattggccggaagtggcaatagtcaccagggtcatgatgataaaggagagggaaacggcaaaacttgaagagatttgccggaccgtttgccgggctgaagtcgcatgtcccatatcttccttggccataatattcatgccagcagtggtaatagggatattaaacaagccaaaaccggctgataagatgccgtagtaaatcatcagtaagtaaagggagctagcttcattgagggtaactagtaataaggacccaactaaaagtaagataccaccgataaggccaatccgagccactccaaccttgtcataaagtttgcctgagataggagctaagatggttttgatgataccagctggcattaagattaagcctgctatggaagcccccaagcccctaacagtttgaacataaatagggataatgttggatagacaagaaataatgacaatccccaaggtggctaccaagacagcccgacggtaataggtttttttaaagagtctaagatttaagattggttggtctgccttgaggttgaagtggataaacttggcgacaaagactaaaccgataagcaagctgacccaggcaatgaccgaagaaaaaccggaagaaccaaagactgacaagctaaagaggaggaggccaaaaccaatgagggagtcccggatattggcccaattaatggttaaatctgcatttggcaatacatcgggtaagaccagccaagttaaaggaaccaataaaagggtgattaaggcccagatgtagaataaaatttcccaggtgaaagcatcaacaatgaccccaccgacaaggggacccagtgctggaccaataccaataaccccactcattacccccatagcagtgcctcggctttcaaccggcatcaaggtcaagaggacggtctgcatcaaggggatgatcatcccagccgctataccctggatgactgtccccatgaccacaaccggaaaattaaagcccagaccagtcaaaaaactaccggtacagaagagggccaacattaaaataaaaaagttccgtgtccggtacttggtcatggcaaaggcggttatggggaccataatccctttgaccaaggtataacccgagacaatccactggcctaggctagggtcaatgcccaaactttcaatcatattaggcaaggcggtagacatggccgtttggttgagaaccacaatcacggctcctgtaaataaaacggcaaaaatttgccaacgggggatttgtaaattgtctcgtttggtcaactggtttgcaaggaagtgtttgaaggttaatttattttcactactcaatctcaagactcctactaaatagaaagaggaaatcacaatgatctcctcttgttttccactgattaaagtaacatagacatgttactgaatcgagtcttaattgtcaagcctgtcactttttgtccggccatcccaattggaaaagccatcttttaagtaatagatatcttcaaagccgttttcctttaatttcaagcctgcccgcaagctcagcatcttgttttcttcatataaataaatgggttggtccttacgaaattcattcattctttgtttaaactgggaataagggaggctccttgcccctaaaatatgcttgcgtttaaattcatccttctcccggacgtcgatgacttgggccttgcggatgtcctctttaaattcctcattggtcaaaggagtcgcagccttcctgcgccggacaaattggacaatctcataaattgcccagcccaagccaactacaatgattaacaatcgtaaagcattatttatatccaatccaatcatcctttaagctaatttttcttttaaaactaaagatcctgccccgatcaccccggcatcactttccagttgagcaatcttgaccctggtcttatcccttaggggcggaaacaagtagtcggccaggtgtttttccacggtttcctttaaaatagctcctgcctgagataccccgccaccaatcacaataacagacggattgacaatattggcaatattgccggcggcgaaggctaggtaatcacaaacaatgtcgacgatcaataaagctaagtcgtccccttgcttagccaggtcaaaaatgaccttggcctccaaatctccccggtcagccacttggtagagctgactttgacccttattttcagccaacatttgttgggccaccttaacaataccactggcactggcgatggattccaggcagccagacttgccacaagtacaagggaagtcaaatcggtcattggatacagttaagtggccgatttcaccagctgtatcatgggcgccgtggaccagctggttgtccaagatgatccccccgcctactcctgttccaagggtcataaagaccaggttggggtcttggtctccagccccctgccattgttcacctaaggcggccacattggcatcattgtccaggtaaaagtctaggcctaactcttcttccatggttgctttaactgcttggacctcctgccagttcaagttataggcccccacaactgtccctgccttgcggtcaacagagccaggagatcccatgccaatgcctaagatgtcttggctagtcaacttccattcctctaacttggcctgaatcgaagcaatcatattcggcaggatctgactcccatggtcttctgtctgggtcttaatcgaccatttgtccactatcttgccagtttgtgtgagtagggcaaacttagtcgtggtcccacccaggtcaattccgattagcttgtcttgtgccataagtacgtaactcctcgttaaaagttgatatagaaaatttcattatagccccaaaaaatacccaataaggctattgcaatataaattaaggtgtatttcaattgactaccaggattgtgagttttggtaatcatataagttgccaagtatcctccgactaaaccacccaagtggcccatattgtcaatgcctgttgacaatatcccaataaaaatattaagtccaattaatagaccatactggctggcaatattttggatttgaatccggttagggtagatgcgagacagggctatggtagacataaataagccaaaaatcgcagttgaagccccagctgaaatggaaatgttgaaggcaaatgagaagatattccccattatacctcctagcaggtaaagtaaggcatatttaaagtggccgaagaaatactccaaatttgatcctaagtaataaacaatcaatagattaaagaggatgtgggccaggccaatgtggagaaacattggggtgattagccgccaccactggttaaaataaataatagcaaagttgaacttggccccatactggattaaaacctctgtattttgcgacccaccactcagtgtcatcataatatagactataacagttataatgatgatggcataggtaacataaggcttgttttgaatgctagctagttttcgattttgcaccatatcatcttcctcaattttacataagctatcataaagtataacatacctggctcctaataaggaaaaaattccgggccctttggttaattttcattggatttttcatgaaaaacatggtatcctagtcgggtgtaagagtaattaagaaagatttaggaggttgaaacatgcgcgttaaggttactttagaatgtactgaatgtggcgaccgtaactacattacaactaaaaacaaacgtaacgatgaacaaagacttgaattaagaaaatactgccctcgtttgcgtaaaatgactttacaccgagaaacaaagggtaaaaactaaagtaaaaaagtgttggtgggatgctcccaccaacactaaatattatagaatcaaaaaagagtagctgaaaagccagctactcttttttattggccaaatacctaggccgcctggtcagcttggtcttcctcttcctgaacgacttcttcctgggcttcttcttcatcgccttcatcttcttggtcgtctgcatcctcagcaaattcgccaacgccaaagtaggcatccatcactcgtttgctggcattcatgttttcaatattattgatattgtctggcaggtaaggcaccacagcagcgacggcaatttcaggattgtcgtaaggggcaaaaccagtaaagttcatgttaatgacactggttccgcggaggtccgggtcattactccagtaagaggcttgggcagtccctgatttaccggctgccacatattccgcatcaccaaagactttaggcaaggtcccatagtctccattgactgctaggtacatcccttccttgacccggtccatctgttcgggtgttacatcgatttggttcaaaatttttggttcaatcttggttttcaactgacccacttcccctgtttcaggatgagttccccggatttcggagacgaagcgtggtgcataccgagtacctccgttggcaatagtagcaatacattgggccaattggaggggggtgtaggtatcaaactggccaaaagactggtagagagctgagccagggctttcaaccggactttgctggccaatcatttcatttggtaactctaccccagtgggtacccctaaaccaaattgggagaagtagtagcgcatcttgtcgatggacttttgatagtccatattcaactgctcacctggttcatagtcccatttgtctcccatccgcatggctagcctggacatgtagatattggaggaatattggatggcctgagtttcattgaggggaaccgacccactttggttaaagacggatgaaatactgctagttccagtgaaattcatgggggcatcgacaatgatattgttggaatcatctaagaccccatccatgtaagctgataggacggtcgcccctttgacactggaccccatttcaaagaatttagttaagtttcccatggcgtcatcgacaatttctccgtcactgttcacccgctttccggtaaagccaaggattcccccatcccttgggtcaatggctatcaggtagatagaatcattgaggccccgtctcttgttgagggagtcaatggcgatgccttccattttttcctggaaatcaatatcgatatttaaaaccaggttgtcccccttgctacccgcatagcggacattttgggaaataatctctcccagcttgttggtttccgtttcgactttagacttgctaccactcaagacatcttcaaattggtattccaaataggaaatcccaacccggtcattacgggaataacccttagctaggtattcaccaatccgctcttctgggatacccgtttcctcgctggagacctggccgagaatggacttgagcatattgccttcaggataaatccgttgccagtccactccagtatcgacccctggtaggtcatccaagttttcgctgacctgggctagctcttgggaagacacatcttggtttttgatattaaccgtactcaaggcataggctgaagtcatggtcgaaaaaattgaagtagcggttttttcctcatccgataaagacttaagttggtcttcatcgataaaatccaagcggtcactgctttccatttcttcaatgtcattggcttccatgtaagcttcaacttgatcatcaatttcgtcccggtgaatagcgtaatagtagtccttcatttccctttcggtaatatctgggtcatcagattcaaatgggtcggcatttggcaagtcgataatattagccaatcggttggcaacattggccatggcttggttggagacgttctgcccccgtgtataggtaatggtattgtgggcttcattgcccactaatttgttgagctggttatcgtatatttcaccccgggcaaccgggccactaataaccgtgctttccgtccgatcaacttcagcttggtattcttcctctttaatgatttgcatataagccagacgcaggataaaagttgcaaataaaataaagacaacaaaaaacagcaaatttaatcgaaatggaatttgcgattttaacttttctcttcttcgcttgttaggcaatttcaagcctacccctccgttaaataatctactcctaattttatcaaatccgactaggaaatgcatggggttttccctaaacttttctaaagattgtctcgcgaccaaattaaaaaaccagttgccaaacgagtcaatcgtctagcaactggttattagctttggtgctaaaacttaagctgacaaagctcgggcgaaattatttagcttcttggtatcttcttgctacttcatcccagtttacgacattccagaaagcatctacatagtcaggtcgtctattttggtagttaaggtagtaagcgtgttcccatacgtcaagacccaagataggtgttttgcctgaagtaagtggggattcttggttaggagtcgcatcgatttccaatgtgccattgttaacaaccaaccaagcccagcctgacccaaattgaccagtcgctgcagctttaaattcttcttggaatttttcgaagctaccgaatttttcctcaatagcttgacctaaatctccttctggctggcctccaccatttggcgaaagaacggtccagaagagtttatggttggcatgacccccaccattttttaagaccggtacttgaagttcttccggcagcgagtttaattgagcaactaggtcttcaatcgacaagtcagcatatttttcttgaccttcgagagctgcattggtcttgtccacataagtttggtggtgtttgtcatggtgaagtttcatggtttcttcatcaatataaggttccaatgcgtcatatgcgtatggtaagtcttctaattggtaagtcataagttactcctcctaatatttcgaatctaaacttattttaacatctgattaaaaaacgtccatagaagtgcttatatagattttttatctgactttttaattgtaaaatattgttagaattaggtagaataatttcatgtctactagtagaggaaaggaccgattaacttgtttgaatttttaaaactcagcctaagttcccccttggaaatccaccaaggcagaaaaatgactaaaaataccttctttgccctttttattgctttcgtcatcatctcactcatccctcccctcttcaccctagtcccagaataccagcaatttaggtctgatgtgagtgaagtggaaggtcaattgccggattttgccatcgaagacgaccagataaaaacagaccaagaagactacattcattttacagatacaatttccctatattttgaccctgacaaccaaatgacggaagatgagaccattgaccggaatgtggagttgaacttctccccaatcaatattgctttaagccaggaccaaatgaccctctacgtctatggcagtggccagtcaatttcttatgccaacttgcctgactttaaccaggaccaattttcttttcttttaaattccatgacccaaatcaacctacccgtcatcttacttgccttctttgttcttttcggggttggagccatcattctaatctaccaatacattttagttgccctaaccaattattttatcagtatcttttatttacaagggttgggttttaaagctgtctttaaaatttccctcctagctattgccctccccaccctagccttatccattgctagtgcggtcggtttacaaaccagtttgagcggtcctctctttaccatcttttccatcctcatcttcttcctatccatccgccgtcttaaaaaagccaagaaagccaattagctgttagagtataatacttatgtgacacaaaaccattaaaaaagaggatgcttctgctatactgaagttagcacccaacagaaaggaagcatcctcgtatggctattataacagaagaaatgcgctatcgcgaaaaagttgtaaaatatgcgatcaaacagggcaacaatgcccaagcagcccgccgttaccacaccaaccggatgcaggtcaaacggtggcgtgaccgttatgatggcacggtcgaaagtctgcgaaaccagtccactcggccccatagccatcctcgtcagcaccaaaaagaggagctgaccttgattaaaaaagtttatcaacgctacggccatgaagggcttgcccaggtttacgttgaatgtcagaaaaggggctatcgtcggtcctatggcagtatgagtaagcagattagagaccgcaaatgggggatgtcggaagaagctgtccccaaacgctatcccaaatcaaaatggcaaccggacccggtgtcttatcccggtgaaaaagtccaaattgatatcaaatacgtccctcatgaatgcattcagtttgagagttatgaccgtcgttactaccaaatcacggccattgatgagttctctcgcaaacgacacagtaccatcgtcgacgaaaaaagtgtcacgcatacggcccaatttctgcttgatttacaagaccagctgggctttcaaattcagatggttcaaactgataatggggctgagtttgttaacgatcccgataaaacaacgaaaaagaccttgtttgaacaacgcttaaaagagcttggcattcagtaccgaaccacccggccctactccccttggcaaaacggaaaggtcgaaagaagccaccgggaagatcaagttcgtttttatagtaagcgcgtttttacatcggaagcggatatgaagaagcaacaccagcggtatatgagtcgccataataacattgtccgaaaagtcctcaattttcgaagtcctaatcaagtggtcgatcagtatagggcagaagtcgcttcttagccttcatcagtttacattttttcttctccccgtcaaggaccgctacgctttcctccttgaccggcagggcgaaaaaatgagttggttgtttaggctaacaagcgttattcctagaagcgggtgtcacatatgtttgattactctagaaaaaaagccaagaaagccaattagccgtatagatttttccagtcaatttcggtagaattgtaaagtatagtatttaggaggttacttatggattataaattaaagatagctgaaagtatccaccaggtcttacaagaggatcttaccaaagaagatatctactccctcttggaacggcctaagttggaagaacacggggatctcgccttcccgacttttcagctggcccgtatttttaaaaagaaccccaaggaaattgccagtgacctagcaggtaaaatctcttctgacttggttgaccaagtcgaagcagttgggccctacctcaactttcatttaaaccgaaaaacggtctcgtctgccatcattcaagaaattttagaccaagacgaaaactacggcgatcagagtgtcggacaaggacaaaatgttcctattgacatgtcctcccctaatatagccaaacccatgtccatgggccacttacggtcgactgttatcggcaatgccctagcgaatataatggaaaagatgggtttcaacccgatcaaaatcaaccacctgggtgattggggtacccagtttgggaagttgatttatgcttataaaacttggggcgatccccaggcaatcgaagaggaccctattccggaattattgcggatttacgtcaaattccatgaagaggctgaagacaatcctgaattagaagaccaaggcaggttgtggtttgctaagctagaacaaggtgattctgaagccctagaactgtgggaaaaatttagggccctttccctagaagaattcaacaagatctaccaacgcttaaatgttgaatttgattcttacaatggggaagccttttacaacgacaagatggaccaaactattgaactgattgaaaattccggtaagctggttgaagaccagggggcccagattattaaattggacaaatacgacttaaacccagccttgatcaagaaaaaagacgggtccaccctctacattacccgagatattgcagcagccatctaccgtaaaaaagaatacgactttgcccaagccctatacgtggtaggccaagaacaggctaaccactttaaacaactcaaaggtgtcttgcaggaacttggctttgactgggcccaagatatccaccacattccctttggcttgattaccaaggacggacaaaaattatccacccgaaaaggcaagttggtcttattggaagatgttttagacgaagccagcaagcgggccttggaacaaattgaagataaaaacccagacctagccaacaaggaagaaattgcagaccaggttggggttggggctgtagtcttccatgacttgaaaaatgaccgaatgaataactttgacttcacgattgatgaagtggttcaatttgaaggagaaactggtccctatgtccagtattcccgggtccgggccctcagcattttagagaatagccaagttgaccttgaccctaaacaagtgcaaggcttagaagatgaccatgtttggtcagttgtgaaattactggaaaaattcccaaacgtattatccagagcttcaaaaaattatgatccttccctcattgccaagtatgtaatcgacctgtcccaagcctttaacaagtattatgccaatgtccgggtcctggatgaagatggagacttgaccagcagactagccctagttaaggcagttgaaattttaattaaaatcaacctcaacctcctaggcttgtcttccccaagcgaaatgtaggctattagtcaaagataaagcaaaaacagctagccataaggggctcttaattagggatttatttccttaaaatttaatcggcatgaaggtattaccctttgtgccgatttttatatgtcaattttccctataaagttccaatatatccaaatggtttgttttgtagatttcaagtttaagttagccaccctgcgattgacattttactgaatttcaaaaagttatatttttgccaactgtcactgcttttgctttagatggggatgggcatgatatcgcgacgacaggagcggatgtgttcgaatggatttggctttaaggccaaatcaacacataagctaagtcatgcccagcggggtcccatgtcaagcaaaagataacaactatttctgttagcctaattgcctcatctctcggacaaaggcttggtagggcgaccgatagcccaagatttttcgcggatacccattcactcattgttggattcgtctgacctgactgtcggttaagtcttggaaagactggtatttgggtaggaagcgccgaatcaatttatgttggttctcactgctgcttcgttcgtaagaagcatagggacggcagaagaaagaggggatgtctttggagacttggcctaagctagcaaattcactgccattatcagctgtgatggactggaagacttgactggccttgtctatcagccccttcaaaaaggcttgtaaggtctgagtgactgccctggcactttgacagggtattttagagagcttctcaaaccgggtttttctctccaccagagtcagtaagacggggtcgccttgccactttcggcccacaaccgtgtcgatctcccaatggccaaaagattgacgattttcaacggtttgagggcgttcttcaatcgaaagccccaatgtctttctattgggacgtccccggcggtgatcttggcggtctttccgccccactttttccaagaggtcggcattccgtgtacgcatcaactctcggtcaatccaatggtacaaagttgacgtgctgggaatctggtcaggctcaaagacttctttggcttgatgaaccaccacatcgggcgaccagttctcctgcaagagtttttggtcagcccagtcaagaaaggcggaattgtcgacccatttgggtcgtcgcccacagtgacggcggtggtcttggtaggccttggcatgaacgtcggcaaaatagatgttgtcatagtaggtgtaagttttcccatagtgtttctgttggcgtttttgggggacggaaccggttttgatggcattgtggatggtttgcggacaacgcccaagcagcctggtaatctgtcgattggaatagccttcggccttataggcttcgattttatgcatttcggctagggtcaaatgtgttcctttgggggaaagtgtgctatcatgggcttgagtcatgtgaattctccttatattcattggtttagtcgactactaatataacagaaattcacatgactttttatatgcaagtggctaacttgattttacaatctaccactatataataaaaaagaaaaatggagaaatatggataattgaaacaaaaggtggagaaagaaaagagataagtaaaaatattgataaacagattgagaataaattcaatgcttttagggaatacgctaatgagcataaaattaattgggggtttgtaagagataaagatacaaggctttatataaataacacagtttacaacgaagatatgagcgatggtgaatggaagagaatcgaaaatgtattataatttatatgtttattgcttaacctagcataaggagtctaaatgaaatctaaagttttagagaatgaagtaagacaaacttttatgagtgtcacatggtctcataaaatacaagaaaaacaagcggaaatatgttttagtagatataaagcttgggaaattattagaataatatgttctgctttaactacagtaggattattttcacttattttttcggaccaattaattgttaagattatatctgcgatattgtctctaacaattacattcataagcatgatgttcaagtcatttaacttacaggaaatgtctgacaaacataaatcaacagcaaataaattgctcattatgcgtgacaagttcaggaccttattggtagagatacatttagaaatagaagaagattcagaattattaagtgaatataaaattctacaaaatgagcttcatgaaatatataatgaagctcctaacacaactaaaaaagcagtagataaggctagaacattcttagaaataaaagaagataataagttttctgatgaagaaatcgatagaaatctacctgaaaatcttagatatggaggttaaataagtgtctaattatgtaaagaaataccctgatattattcctcaagaatctagatctaaaatatcaataaggtataaaaaaataacaaaatcgataaatagtggattttggaattcaactagtgaaactaataatagtttttatgtgggttcttatgggagaaatactgcaattagtaccagtgacattgatatattaattttattacctagctcagaatttgataggtttaataatctgagtggtaattctcaatctcgccttttacaatcagttaagaatgccattaaaacaagttatccaaacagtgatatacgagcagatggtcaagttattaaaataaattttagtgatggtattaaattcgaaatacttcctacttttaaaaatatatatggtgcatacatatatccagatagtaatctaggtggaaactggaagtctacaaatccaaaaatagaacaggaagctatgagacaaagagataaagaaagtaatggactattggtagctacttgcagacatttaagatttattagggataatttttataatagctgtcatttatcagggattgtaatagatagttttgtatataatgcaattggaaattggaagtttgttgagaatgtaacatcgacaacaacacaaggcaattatgaaaaaactttattaaattattttattgatgaaagtaaatggtggtcaatagttcctctaagagcgccagggagcaaagatgaagtttcaacaaacgatagtattgagtgtttagaaaaagttttaaattatatggttagataatattttatgaataaagtatgaattttcatctttttaaaaatctaaaggctatgagcatataaaactcatagcctttttcttgccacctaaagactctctaaatcagtttttacaaaacccctaattcaacgagccttaatgttagctgtttttttattcttcaaccttagctaaaaactgcttggatgggcatactagcgagggcatgctaaactttaaatcgattagttggcggttgcaaatatatatttgtatcacgcaaattgatttggtgacccccaccatctaaccttctaacaagtggttgaaataatcagtgtctaagaccttgatttccttgcaactgtactccagtcgtttgttttgggtcagttccttgaccactttgcccgccgtctcccgggtagtaccggccacttccgacaattggatgatggtcaagggatacgggattagtacggcctctccctgccgggttcccaggtcaagcatccacaaggcaagcatcaattcaaccctttctttggcactggagacggcagctagttggatcctcttttcttggaaaaacaagtcatccgacaagctacggtaaaattcgaccagcaagtcactattttggctaatgatgctttcaaataagtcggtggggatcatgagcaggcgagttggtgtttcagctataatattgtaactatagtaatcattattgaaaagatctccgtaagccacaaagcggttttcaattacaaaatccacataactataattgccgttataggttgtccgctcaagtttaattaagccttccaggacaaaataatagtagtgcttgtggtctccttcatagctgaccacttggtttttattatagtttcgcagaatggactggtcctttatttgcttaatatcttggctgtcaaagacttggaaaaagggtctttgggccaaatctttaatgtacttttgcttgtcttgcctaaccatttagccaactccaattgttctcaacttgatacatgacaatcacttctttatttcctataagttctctcgaaagagaggcatagacatgcaacgtggacctccccgtcctcggaccagttcgctggccttgattttatggagtttaagtccagcttcttctaacaaggcattggtcccccggttgcggtcataaaccactacttcacccggggcgatggctagggtattggaaccgtcattccactgctctctagccccagccacagggtcatttcccccacaagggatcagggtgacttcatctaaaccgagagcttcggccaaaaccctgtccaattgctggctgtttttttcttccatttgaatctggccatttttacctggttttaaagagacgacccggagaccagattggatttcggagtggatagtaaacttgtcataatcgaccatggtgaagacagtatccaggtgcataaacttgcggtagttaccgattaaaaaggccaaaacttctttaaagacaccagcttgaaagagctttttagccagtttttcaatagaccgggaagcggttcgttgcgatatgccgacagctaagacgtctttggataaaacgagctcatccccaccttctaagcgactttcttcaaatcgattgtaaaaatggtccaccttgtcgccaccatattccgggtggtagtcaaaaatatactggccgtatagggtttcccggtttcgggtgtcagaatacatgtggttgacagacaccccatttgccatgctagcaaaaggatcccgggtaaagtagaggttcggcatggggtccaccaagaaagggtagtcagtctcgatcaagtcggccaaagactggtaagagccttggtcaatttccgcctttttaaagccttccatgcttttcaggaccatgtcaaatgtatcaaggccatgtaaaatttctttgacctggttttttgcattgtcagaagcaataccagcctccgcaagccagtcttggataaatttttctcttactccagcgtggtcaatggcttcagccaccaatttttctaggtaaagaacttggacaccattttgtcgcaagactttagcaaattggtcgtgttcggcttgggcattttgtaaatcggggatatcatcaaagagtaagcggtcgagatagtctggcatcagattctccaattccttgcctggtcggtggagcaagaccttttttaaccttccaatttctgactggacttgaattgctttctgactcatggtcaagtcttcctttctacttaacaatcattttatgccattataacagctttttggagcgcgatagaaatttattttaactagctaacttaaattggtcctgatgctttaaaaacctagagaaatagcttacttgcgccggcggttttttctttgcttgtagcggttaatttttttcttgtaattgggcttaactttcttcttagccttcttcaccatgccagcgatctcagagtcataagtctttttcttccctacttgctttctggcccggcggtggtcatgttttttatcatccaccacttcatggttcttgatggttttggctacaaagtttatcccccggtcttctaggtattggacggcttcaatttcgtcaggaccatagaaggtaacagccagtcctgctaggccattacgaccagtccgccccacccggtggataaagtagtccaggtcatttgggatttcggcattaatgacatgggaaaccccttcaatatcgatccctctggcagccaagtcggtggctacgacatattggtagtctaaattgcggatttgtcgcatgacccgctttctctctcgggcttctaatccaccgtggagtgtggcacagtccagtcccctctcttccaaagcctgggcaatttcttctactcggtcctgggtattggcaaagattaaggctaaataggcttggcctagggtgaggaggtcatagattaaatcaacccggtccttacttttcgttgcgatcagccaattttcgacctggtcgggaatcaaagattggctttcagtataaataaatttaggctggttgaggtattttttaaagaagggcttgagcttgtcagggatggtagcagaaaagactaatagttgactgctttgacctacccgactggccagttggtccacttccctaagaaatcccaggtccaaggtcatgtctgcctcgtccactaccagatattgggctgtataaatattaagaccgtggttgctgaccatgtctagcatccggccaggtgtcccgatggctaggtggggttgtttttgttctaatttttgaacctgtttttccttgttagacccaccaacataattttcaatccggaccgcttcaccagcaggcttgataaggtcctggctaaattggtagagctggtcagccaactcccgactgggggctgtgatgaccacctgtacttcatccttgtctggctgaatagcattaatcaagggcaaaagaaaggcgtggcttttgcctgaaccagtttgggctttgactaccaggtctctcccagctttgatttccggtattaccttggcttgaacttccctggtatggacaaagcccatatctgccagggcaagattaataaagggcttaaaatgataatctgtaaattgattgggcatggttggcctcaactttctattcgaatcttttttaaaacttcaagaactaacctgtctgatcctagaccatagtataaaggactttgttagagtataatacttatgtgacacaaaaccattaaaaaagaggatgcttctgctatactgaagttagcacccaacagaaaggaagcatcctcgtatggctattataacagaagaaatgcgctatcgcgaaaaagttgtaaaatatgcgatcaaacagggcaacaatgcccaagcagcccgccgttaccacaccaaccggatgcaggtcaaacggtggcgtgaccgttatgatggcacggtcgaaagtctgcgaaaccagtccactcggccccatagccatcctcgtcagcaccaaaaagaggagctgaccttgattaaaaaagtttatcaacgctacggccatgaagggcttgcccaggtttacgttgaatgtcagaaaaggggctatcgtcggtcctatggcagtatgagtaagcagattagagaccgcaaatgggggatgtcggaagaagctgtccccaaacgctatcccaaatcaaaatggcaaccggacccggtgtcttatcccggtgaaaaagtccaaattgatatcaaatacgtccctcatgaatgcattcagtttgagagttatgaccgtcgttactaccaaatcacggccattgatgagttctctcgcaaacgacacagtaccatcgtcgacgaaaaaagtgtcacgcatacggcccaatttctgcttgatttacaagaccagctgggctttcaaattcagatggttcaaactgataatggggctgagtttgttaacgatcccgataaaacaacgaaaaagaccttgtttgaacaacgcttaaaagagcttggcattcagtaccgaaccacccggccctactccccttggcaaaacggaaaggtcgaaagaagccaccgggaagatcaagttcgtttttatagtaagcgcgtttttacatcggaagcggatatgaagaagcaacaccagcggtatatgagtcgccataataacattgtccgaaaagtcctcaattttcgaagtcctaatcaagtggtcgatcagtatagggcagaagtcgcttcttagccttcatcagtttacattttttcttctccccgtcaaggaccgctacgctttcctccttgaccggcagggcgaaaaaatgagttggttgtttaggctaacaagcgttattcctagaagcgggtgtcacatatgtttgattactctagaatcctagaccatagtataaaggacttgccacttataaaccagttattttatggtataattcatcatgtgactgactagaatggagtggagagatagatgacattaaacaccaaggtcctggtaaccctctttggtgcaacaggtgacctagctgcaagaaaactttaccctgccctttaccagttatacaagaaaaactacctatccaagcatttcgccttgatcgggacaggtcgaagggtctggtcagacgactactttcggtctgttattaaagattccatcaaagatatggaccaaaataccagcttgcaaactgactttgccaaacacttttactaccggtcccatgatgtgaccaaattggaccagtacccagattttaaggcctattcagaccaaatagccgccaaacacaagatcggtggcaaccgcctctattacctatccatgtctcctcgcttttataaggtgattgttgaaaacctcaaccaacacgctttttttgattgtggtggctttagccggatcattgtcgaaaaacccttcggcgatgaccaatccagtgcggcccaattaaaagccgacctgggccaggtagtcgacttaaatgatattttctttatcgaccactacctaggcaagcctctcgtccaaaacattctcaccatgcgttttgccaaccccctcttcaagggaatttggaacaaggaccatattgacaatatccaaattaccctggccgaaaaagtcggtgtagaagagcggggcagcttttatgacaagactggcgccttaaaagacatggtccaaaaccatatcctccaatgctttagcctcctcaccatggaccaaccagacgctctcactactaaggctattttagaagccaaggtagaagccctagaccggatcgaccttagagacgaccacttgactaagtcaactgtccgggcccaatacgttgctcattccacacctggtgaggaatcctacacacaaaatgacaaggtggcagatgcctccactactgaaacctatgtcgccggccgaatcaatatcctagaaggagacctagctggcattccggtcttctaccggactggtaaaaaattagccagtaaaaagacccggttagacattgtctttaaagaccaaggcccctccctctttgacaacaaccaaaacgttttaacggtctacctagaccctagccggaccatacagctcttaatcaacggcaaggagcgggggaatcccaaagcttttgccagacaacaattagccattgttgccacagatggggccctggcttggcctagcgactatgaaagcctcatctatgatgctttgcatggagaccaggtgaactttgcccagtatgaggaaatcgaagcatcttggaaatatgtagataaagtccaaaagatttggcgggaccaagatcaagccctctatagctatgaagtctactctgatggtcccaaagaagcccaggaactcctggagcaagacggtcactactggatcttttaaatacaaagcaatagcctactagccaaggcttggcctttccaagaccgcctgtcccagcaactagtaggctttttttattttaacttgtcatgggggtaggcatgaactttctccagtcctgcaaagtcttgctgtctcaaggcttcaaataaaacaatattggctgaattcgacaggttgaaggaccggacatggctatcgtccattgggatccggatacacttgtcagcataatcgtgcataaatttttccggcaggccagtggtttctttcccaaaaatgaaataatagtccttgtctgtgtccctatagtcaatatcagcataagtatggtaggcgaacttagagactaggtacaagtggcgggtatcaatcgcctgcaaaaaagaccggagattacggtggtaggttaagtctaactcctgccaatagtccaggccagcccgcttaagtgccttgtctgtcgttttaaatcctaagggttcaatcaagtggagcttggtattggtccctgcacatgtcctggcaatattgccggtgttaggtgggataaggggtttgtataaaactatatgattagtcatgatttatgcaacatcctttgtctgtcttggccattttattaagtctggtaaaatagaaaaacgtatcatttcggtcatgcaacagcgaaatgatacgttattaagtcatccatattcatttacttatatcagtatctgatggctaactgatataaaccaatgaacttaatgaacttatgaaaactattatacgccatttttcttttctttgcaagttctcttttaacaaaatatttttacagaaaaaattttgctagaggctagcataagacggggctccagcttttccttaatcggttaaatccgaatcttccaactgaataatgggttcatccccataaccagcaccaattgccacatctgtttggtcactagcctggtcaatatctcgtctgaggtcatttaatcgtctggcctcttccttgcttacctgccgtccgatggcataattcagacgcttaattaaatcgtcagccttgagtaaggctcgacgttttaattttttaccttctaggtccaacttggcttgaaattcctctcctggcatgggggctaggaggtgggctaggacatagccggctccagcaccaagggcaatcccaatactagcagttactttattcattttcattcttcctttccttacttaaacttactaattcaacacagaggataatagcatccatggccttgactaaatcttccaaggaagcaaaggttggggctagccgaatactattgtctttggggttgtcccccttaggataagtagcattggcctgggtcacagccaggccaatatccgccagcttttggacaatttcttgggcacagccctcctgggtggttaagtggataaaataccctcccttgggcttagtccagtcaaggagctggtggtttgggaaggcttcttccaagcggtttagaatatagtcgaatttgggtttcaagatagccgcatgtttggccatatggtctaagatattggccttgtttttcaaaaacagggtctgccttttttggttcaacttgtcaaagctagtcagttgcttggacaggaagttctgaaaggcttggaggttgttccttgaagctgctatggctgctattcctgctcctggcagagtcattttagaggtcgaagtatagataaaagggcggtcagccacctggttttccttggctaggtctaggatgttggggatttcaacctggtcttcagtcaagtggtggacgatgtaggcattgtcccacaaaatcttgaaatcggaagcagctgtctccattttgactaggcggtgaatcgtctcatccgaataaacctcaccggttggattgctatacttagggacacagaagatccccttgatactagggtcatccttgaccaggtcttctaccacatccatgtctggccctgacccagtcaaaggcacgggcaccatgtcatagcccaaataatctagcatggcaaaatggcggtcatagcctggtactgggcataaaaacttgaccggaccttgctgggaccaaggatggtcttggtggttcataaagtagtccaggcttaagtacatcacttgcaagctggcattaccgaccaccataacttcttctatctccgtctccaaaagttcagcaaataaggttcgggcttctaaaaccccgtcaattccaccatagcttctaaggtcgacttgatcttgggacatatagtcctggcttaagtctaggctaagcaagtcttgagacaggtcgagctggtccttggatggaatccccctggcaatatttaagttgaccggatcttttaagtatgcttggtattcattttttaacttttggagatattcaatctcttggtccatggtcaccataacctcctaaatttattgaaattaacattaatttggtttcattatacagtatttacccttataataaaatctatgtgaaagagataaatgggacttatacctaaggaagatgacattttatgaaaatcggtgcccgtacctttaaaactgctattgctatctttatcgctgtctacattccagtcgccattaacttaccagaattaaccgttttgtccggattggctgttgtagcatcgatccaaccctccgtcaagcgatcttacattaccctaagggaccgggtcctctccaatgccattgggggtctagttgcttacataactgctacccaaattggagtctctcctttcttgatcggcctggcttccttgttcttaattgccctcctccaccaattcaagttagatggggtgatttccctggctgtcatgaccttgatcattgttatggtggaatctggccaggcccccttgtatactgctgtcacccgggtttccgctaccgtcttgggggttatcatcgcctttgtcatcaatacctttgtctggcctcccaagtatgaccacaagttgtttgaattaaccaaccatgtcagcgataatatcatgcgaaatatccggatcgccttacgaaaaaacacccaatacggagttatgaaaaaagacctgaaaactattgaccaagacatcgataccatggaattattctttaaatatattaaagaaggccacatcaaccccttccggatccaaagcaagtattctatttcaagactcttggttgtctaccggcagtttattaaggtaactcggtcagccttaaaactagccctcaccctccagcggtcagaaaatatttttaaccactttgatgaagacttgagactatcagtcagggaaaggattgaagtcttgatgtctgcccacgaacaaatcttacaaaaatggaatggccgggtcctacctgaagaagttaagtttatgaaacacaaacgaagcctacgcaaggaatttatggacagcttttatcatgaagctagcatcgacaacaagctaggtgaagattacatcgatagcaacaccgtctttaaaatcatgtcgtctattttggaatacgaagaaagcctgatccacctcaacaccctagtttctgtttatgttaaaaatcacgccaatgaaagtgacattttagaaaccaactttaacaaacccatctaagttagacacaagatttgcttcaaagtatgctaggcaatcaaaagtataaaagactacaagctttttagcttgtagtctttttatcagcattcctgctttttaaactgatttcatcacaagtttactatggtttgccactaagcttagtacttaccggtcagttgcttgtaccggttaaaccaaaggtcaacatagccttctgaaaagggacctctttcatttttgatccaagaaactagaattttaacatgttccttgaggatgtagtcaatttcgtctggatagtcccacttcttaccgtggtcttcgtattcatcgacatccaagagacgcttttccccatctgggaaaatcttgacatccaggtcataatcaatatatttcagcccttcttcatcgatcaaaaaaggcgaagccaggttgcaatagtaagaaatgcccttttgtctaatcatggtcacaatattaaaccaataatttttatggaagtaaactagggcaggctctctggtccgccactttcggccgtctgattcaatcactagggtatggtcattgcaaccaattaaggaatggtcgctggtttttaagaccatggtatcccgccatatccggtggagtgacccatcatgcttgtaacttttgattgtgatgaaatctccttctcttggaaattgcatcagtatccttccttttattctgtaagttttacagtcgcacaataaacattatatcataaaatagcttatcttatagggacaatttgcctaatttaaaataaggaagggttaaaataagtctcccagatcttctcctggactttcgggaaggcataggcctctctctggtcgggactcagccattcgcactggtcgggaatggcttggccagaatcaacttgaccttccaacaagtaaatggaccagttgagatggctaaaggcgtggcttacctggccttggacttgctggttaaattgactgggcaagtggtagtagtccttgacataagcctggacctggttaacttggttttggtctaagacctcctgtaaggctccctgcttgacctgccaagattctggatcctggctagcttgctttaagtcctccagattaattaagggaaagagccagaggttagctaagaggcccttagctggtcgtttttcgaccaggtagtctccatccttatccttgaccagcaaggcaagataaacttcttttttggcctttttgttcgaactagcaacggggtaacggcgccaggtatcgttcaggtaggactggtcaaattccttgatgggggataattctggattataattcttgggagttgaaatggtcgcccccaagtccatcatggcctggttgaagtcaccaggacggtctggatctatgatctccttggtcagggcttcaaagactttgcggttggaaggttttttgacgtcaaggtctacttcaaagacccgggctaaaacccgcattaagttaccatccacagctggttcagcctggtcaaaggccatggaagcgatggcaccactggtgtaagggccgattcccttgagctttttgatctccttagggtctttgggaaaatgacccccgtagtcttccataatttgctgggcagcttgccgcatgttccgggcccttgaataatagccgagtccttgccacagacggaggaggtcatcttcattgctctctgctaaagacttgatgtcagggtaagtttggatgaatttttcataataagggataacggtggctacttgggtttgctggagcatgatttctgagacccagatcttgtaagggtccttggtctgccgccaaggtaggtctctcttttcttggtcgtaccaagccaaaagggtctcacggaagtcttgccttgtttggtcatcccagaggtcaataccatacttttcttctaagtctttccggtccactagtcttcttcgtcctccttattctcaagatactggttgattaggtcactggagaagcccttattgaataaaaaggccttgattttttgccttagttcataaccgctagcctttttccggtagcgcttataagccttgtccccttgcttgattaaggcctggtattcttcttcctggtctagttggggttgaacctccgccaaggcctggtcaatcacttgactgaggtagcctttgttaaataggtaggatttaaccttggctagtcgctgcctttgtgatttgttccgggacttgttaaattgtttttccaccagctggctggcattgtccacttggtcttggtaggggtattcaaccatggctgtttcaatgtcctggtctcctacccccttttggaccagttcattttgaattaatcgaggtcccttgcggttaatcttagctgccgttcggatgtaggacttggcatattctaaatcattaatcaaggcctggtcttttagcttggcaatcactgcctggctatcttggctaaaacccttgtcttcaaggtcatcttggacttgtttttcagtccgcaaggcgtaagacaggtaatttaaggcccggctgtaggccttggaaaattggtcttctttttccaggtctttttgcagggactgggaaaccaccatccccttgcgcaaaaagtgcttcaccaaactcccttcactgatggggaaggcatagtctccatctaggtagatattataacggccctttttcttttggggctggattttcgtaataattctttcctggtcttggttttttgcttggtcatgtagcttagcctgactagtttccccttttggcccctggtcacctgcctggtctggcttatcttcagggtttgctcttgacggtttatggtcctggtctgggctccccttttctgggtcaggctttctggggcctagccggattaacttatccttatccatcgactccctcctctaataaagactgccagtaagagtcttttttggcatagccttcaattttataggactggttagttttgtcaaatttttcctttttaacaatggttccttgttggagggctgagtaaatatccccccggctggccggtaggtcgacttggtaggtggccataatttggtccatcaaaaagttttcaatactggacttaaggtaagtgatatcctggtcgtctaaggctgagataaggaggttgggaaaagccaagggggtaaaggcttggtctagtttatcctttttattgtaaacagttagtcttggaatatcttccatatccaaatcttccagcaaggccactactgtgtcttcttgactcacacggttggggctagaagcatcaaccaagtgaagcaaaatatctgcttgcctgctttcttctagagttgacttaaaggactcaattaactgtgtgggcaagtctttgataaagccgactgtatcggtcaaggttacttgcaagccactgggcaaggtcaattggcgagttatagggtctaaggtggcaaataatatatccttctccagactttgactaccagtcagtttattgaggagggtggacttgccggcattggtgtagccaatcaggccgatttggactatctgactttcctggcgcttttgccggcttctcttgcgatggtcagccaacttgacgagttcctttttgatatcagaaatctgcttctggatgtgacgccggtcagtttctaacttcgtctcacctggcccccgggtaccaatccccccacctagtcgggacaagttctccccttgaccggctaaccttggcaggaggtagttaagctgggctaactcaacctggagccggcccgccttggactgggcccgcatggcaaaaatgtctaaaatgacttgaattcggtctagaaccttgacattgatgaaatcctggatattgcggacatggctgggggataattcctggttaaaaataaggcaagtcgcatctttagcttccaccaggtctttaatctcttttaacttccccttgcccacaaaggtcttctggtccagactatcccgtttttggcttatccgtcccactacccggccatgagcattgttgactaaattttcaagttcgtctagggagtagtggaagtcatagtctgtttcttctttttgaacaccgacaattacgacatcttcaaatcctgttttactcaatatagtcttcctccaagaaatttttaacatcttttattacttcctcaagttgacctgggtcttggattaagtcataccacttgtcaactggggtccggttgtggaaccaggttagctgacgtttggcatagtgcctagaattttgctttatgtcacggatggcttcttcaaaagtctggtccccatctaggtaggacagaacttctctatagccgattccccgccggctttgggcatcttctttcgtcttagcttttagccattttacttcttccaaaagccccttgtctaccatttggtccaccctggtattaatccggtcatacaatttagaccggtcagtattcaggccaatgataaaggcttggtagagagctggccccttctttttttcgtcctggaagctagagaatgtctcccccgttacatggtagacctccaatgcccggatggtccggactaagttgttgggatggatcttggctgcagctttaggatctagtcggtttaaaagttgccagatgtattcccgtccttcttggtcagccaagtcctgcaatttagcccggtattcgtagtcaggctgggcatccttgccgtggctgacatcataaatcaaggattcaatgtaaaggccagtccccccaacgataatggggagtcgatttttacttgcaacggcttcaatcttcatccggccctggctttgaaaatcagagacagagtaatcttcttggacctccaagatatccaggaggtggtggggaataccggctttttctgattcagtcaccttgccggtcccaatatccaagccccggtagacttgcatggagtccccgttaatgatttcgccagccaagtcttgggccaattctaggctcaacttggtcttcccaaccccggtaggaccaactataacaataattttttccttcatggtctctcctttgcatggctaagaaatataacctactttgagtctagcacttttaaggaaaagagacctggcaaccaggtctctttttgtgtggtctgatagatccaactagttttcctcactggactcttcctggtcaatagaagttacagataagcctaactcttccaactgtttttcggataccaaagctggagcatcggttagagggtctttggcatttttgtttttagggaaggcgataacttcacgaatattggcttcaccagctaaaatcatgacaagccggtctaaaccaaaggcaatgccaccatgaggagggaagccgtagtctagggcatctagcaagaagccaaactgcttttgggcttcttcctggctgaagcctaaagcctcgagcatggtttcttgcaattcacgttcatggatacggatagacccgcctccgatttcataaccatttaagacaatatcataggcattagcagttactgattgggggtcatctgctagtttatcgacatcttctttaaccggcatggtgaaggggtggtgggctgccacatagcgcccttcttcttcatcgaactctaataaaggccagtctacaacccaaacataggctagttgatcctggtcgatcaagcccaaatcctgtcccagctggaggcggagggctcctaaagcatcatggacaaccttccattggtcagcgacaaataggaggaggtcaccaggctctgcccccagtttttggcaaacttggtcgccaattggactgtcgttaaagaacttggcaattgggccagctaaaccatcctcattgaccttcagccaagccagccccttagccccataaacagcggtagtctcttggagcttgtcgatttgcttgcgggtatagtggtctgctccacccttggcattaatggctttgactaaacctcctgcttcaatggcagaagaaaagactttaaagtcactgtctttgacgataccactaacatcttctagttccaagccaaagcggatatccggtttatcactaccgaaccggtccatggcttccgcataagttaggcggggaaagtcgtctttaatctctatgcctttgacttctttggtaatctctttcagcaagccttcaatcaagtcttggatggattggctgtccataaaggaggtttcaatatcaacttgtgtaaattccggttggcggtccccacgtaagtcctcatcccggaagcaacggacaatttggtagtaacgttccaagccagcccccatcaacaattgcttgaagagttggggcgattggggtagggcaaaaaatttaccattgtagatacgggaaggcaccaagtagtcccgggctccttctggggtggacttggttaagaaaggtgtttcgacatcgataaaatcatttcggtctaagtaattacggaaaacttttttaacctggtggcgcaagactaggttttgggtcatcttttcccggcgtaggtcgagataacggtatttgagccgcaattcctcagatactgacttatcatcattaatttcaaagggtggggtcttggcctggtttaaaatatgaacttgaccagcttctatttctagcttaccggttgccaggtctgggttgctagccccttcctggcggtagaccaccttgccagtcacttcaatgacatattctttccgaatgtcttcagcagtcgctagggcttctttgtttttctcaccatcaaagaccacctgaaccaggccactccggtctcttaagtcaataaagatcttaccgcccaggtcccgtctcttgtgaacccaaccaaacaggctgatttcttgatcaatataatcttctgttactttcccgcagtaaattgttttgtccattcgtctctctccttttatcctagtgatgccaataggtcttggtaatagtcgcttaggtcctcttggtaaagcttggccacttctatttctttttccttaccggtcgacaagcgcttgactgtaaccgttccctgttcgatttcatggtctcccagggtcatggccaagtcagcctggagcttgtcagctgacttaaactgcttgccaggtttgcggtccataaattctctttcaacatgtaaacctgcctgacgcaagacttggcttagcttgagtgcctgtcgattggcagcttggccgatggtgaccatgtaaatatctaagtggtcctggttcggcagttgaatatcagactggtcaattaacatgaccaaacgttccaaaccgacggcaaaaccaaaggctgggctttgtggaccgcccacttcctcgaccagcttgtcatagcgaccacctgctgcaatagttgtattagacccgaagttagggtcatccgtcataatttcaaaaatcgtgtcattgtaataatctagtccccggaccatattggagtccacctggtagtcaattcccaaatcttctaaaccttgcttgacttcctgaaagtggtcaagggagggatcgtctaagtagtccaggatggatggggcatcttggacgatctccttatctttttgatctttactgtctaagacccttaaagggtttttgtaaaggcggtttttggagtctgggctaagctggtcataatggggttctaaaaagtcaatcaaggcttggcggtaagtcttgcgcgactggttagaacctagggaattgataaccaattttaaattcttgattccaatagtttggaacaagtccaaggctagggccatggtttccaggtccgtggctgggtttttgcttccaaaaacctctacccccaattggtggaactggcgcatccggccactttggggtctttcatagcggaacataggacccatatagtagtatttttggggcttgtggtattctggaccatacattttattttcgacataggcccggactacccctgccgtcccttcaggtcgcagggcaatatggcggtcccccttgtcgtagaagtcatacatttccttgcttacaatatcgctagtctccccaacgcctcgggcaaaaagttccacgtcttcaaaaattggaaccctgacttctttgaatcggtatttttgcatcaaatcttgggccagggattcaatatagtgccaattgtctaactggtcaggaaagaggtcactagtccccttttgcttttgatatttcatgccatcctcctcatgcacattgttttcagtctgcttagtggttttaaatgcaaagaaaaaatccttcctcaaacattgactgtttaagaaaggacgctcatttacgtggtaccaccttagtttagaaagtatcgctactttcccttatcgttaacgcctcaaacgtggtagctttgcactaccattcctccagagtgttcagccttacccctaattggtattttacagccaagaataccatctctataggccgggcaagtttcttgctctttcttcggaagattatttgcttgctactaggatactaaatatccctcaaagagtcaaacctcttcccttgtttataggagatagcttttacctccttgtaaattttaagataaggtcggtttacattctcctatcaattatttctctttattgtagattctcttccggcttgctataattaggcaatgaatatcctaaaggaagggtgccaagatgacccaacttccctctgaattgcgaaaacgattaccaaaaaaacgaacctttttaattatccttatttttattttatgcttgagttttgcttcacttgtggctatggcccaggaaaatactgttattgtcgacagtcagactttaaatatccgccagggccctggcatctcccatgatattattgaccaggctaaagttaatgaccgtttgcaagttattgaccaagaagatgaatggctcaaggtttccttagacggtgaccaagtgggttgggtagccagctggttggtccaccaggctagtcttacttctgaagcccaagtccctgctactgtaaccggggaaacggtcaatatcagaagccaggcttcaacagatggtgacatcttaggccaggtggaaaaaggggaccatgtcagtgttgtccaccaagaaggcaactggtcccagattgtctttgacgaccaagtggcctggctgtctagctactatcttgactttcaagaccaagatgaagaccaagaaggagaaggtcaaagactggttcaagtcaacgatgtggatgccaatgtccgagctgaaccttctagccagtcagaaaaaattgggacagccccagcctaccagacctatccctacctcgatagccaggaaggttggtacaaggtccaatacagtgagaatagggtgggctatattgccgactttttagcagaggaggcaagctcaagtcaagagggccaagctagtcaagttggtattgataacaatattcccatctctcaagctaccattgtcttagatgctggccacggaggcaaggatccaggtgctgtttctggggacacctacgagaaagacctggccttggccaccgcctttaaattacaagaacgcctggcttctgccggagccgatgtcattttaacccggtcagaagatgaatttataccacttgaagatcgggttgaccaatcgatccaggaatatgctgatgtctttgtcagcctccactttgatgcaactgggacccccaactctatgagtgggaccaccacttattatcatgccccaagtgaccaaggcctagctgaatccattagtgctagcctagctgaccaagctagcctacccaacaatggggtccggacggctgactattttgtcttgcgaaacaatccaagaccggccgtccttcttgaactaggctatatggaccatgacagggacttggaaattatcccaaccagccaataccaagaggatgttgcggaagccatctaccaaggactcttagactattttgaataaattatatactaaagaccagctggttttgagctagctggtctttcatggtgtttaatattctttgttcttactgtccagccagatggtcacggggccatcattgactaaactgaccgccatatctgccccaaactggccagtctcaactgggagaccttggtcttttaatttttggttaaattcttggtagagtttttcggcatggtctggttggcctgcccggacaaagctgggccggttgccctttttagtattggcatggagggtaaattgggaaatagataaaatgctcccgcccacctggtcaatggacaggttgagcttccctgcttcatcttcaaaaatccgcatttggctcaccttgcgaaccaggtagtccacatcttctggcccatcttcatcttccacaccgaccaagactaaaaagccttggtcaattttaccgataacctcttcttggatccggacactggctttagacactctttgaataagaactcgcatcaaatcctcctgacttctctttaattggttacccgtttgacagcgtagacatcgggtacctttttcaccttgctgacaataactttcaaatcggctaagttttggatcccgatcaccaacttgacggtggcgatatcttcagcattgacccggcccactacattacgtaactggatggaattggcattagcgacatttaaaatatcattgatcaagccgttacggttgtagccggtaatctgcaattgggcattgtagattttatcctcaaccttggcatcttcccattccacttcaatcaggcgactggtctcagtttcgccttgctggatatttggacagtccttgcggtggatggaaactcctcgaccacgggtgatgtagcctacaatatcatcacccggtacagggttacagcacttactgaggcggatgaggaggttgtccgctccttcgatgaccaccccatcttcgtgccggatcttcattttttctggctctttggacatctctacttcattggagtccacagccagcttctgttcttcctcctccctttccttccttgcctcttgggtcaagcgaagggcgacggtagcttctttcaattcattgtaaccaatggctgctaacaggtcttcttcattggtgtagttatatcgttcagctaacttacttaagttgtccttggtcataaagtcagccgggtcaaagtcatgcttgctgatggccttctctagcaagtttcggccgagttcaatattttcttctctttgctgggtcttgaagaaacgtttgatccggtttctggccttggatgtgttgacatagttgagccagtcccggctaggaccaaaggaatttgaagaagtcagcatttccacaatatccccattttttaatttgtagttgagagggacaatcttgccattcaccttggcaccggttgacttgttccctacttcggtgtggacatggtaggcaaagtctagggtagaagaattcttaggcagttccataacatcgccttttggactaaagacatagaccttgtcttggaagatatcttctttgatggaatccataaagtcactggcattgttagattccgtttgaagctcaataatatctctgaaccaagacaattgcttgttgtcagaatcttcctttaccttctgggtcttaccttccttgtaagcccagtgagcagccaccccgtattcagccacctcgtgcatttgctgggtcctaatttggacttctagtggggtggcatctggtccaaggacggtggtgtggagggactggtacatattggctttaggcatggcgatatagtctttaaaccggccaggcattggtttccaccgggtatggatggccccaaggacggcataacagtccttaattgaagggacgataacccggatggctaagagatcgtagatttccccaaattgtttcttttggtttttcatcttccggtaaatggagtagatgtgtttgggccggccggtaatattggcttcaatgtccaagtcatccactgattcttggatcaattcttgggcattttcaatgtagcgttcccgatcctcacgccgggacttcattaagtgaacaatccgatagtattgctgggggttaatatagcggagagaggtatcttctaactcccacttgattcggctaattcccaagcggtcagccaagggggcatagatttccaaggtttctctggcaatttccctttgtttttcaggccggtggtatttcaaggtccgcatattatgcaggcggtctgctagcttgactaagaccacccggacatccttggccatggctaagagcattttgcggtggttttcggcctggtgttcttctttggacttgaacttaaacttacccagcttactgaccccgtccactaggtcagctaccttgggattaaacatttcggcgatatcatcatagctatatcgggtatcttcaatgacatcgtgcaaaaatcctgtcgctacggttaccggatccatcttgatttcggctaggatggcagcaacctggattgggtgggtaatgtattcttctttggactttctcatctgcccttggtgggcttcttctgctacatcataggcacgtttgacaaaggcaacatggtcactggtcatataggttaagcagaggacaaagacttcttggggggagtaatttttttgcacagccatttctaacaccttctaattaattctagcaatccattaaagaataaggaccatgaccctggtcacagtccttgtagtaactattattataattttttttaggtcccttttcaataaaataaggacattccaactaagattggctgataatttcaaccccgctagaagcacccagccggcttgctccagcttggaccatatcttgggcatcctctaagctccggatacccccagaggctttgacccccatgtcgggtcccacagtggctcgcataagcttgacatcctccacggtcgctccaccgatggagaagccagttgaggtcttaacaaagtctgccccagctcgtttagcaatttcgcaggcccggaccttttcgtttttgtccaacaagcaagcttctatgatcaccttaaccaaggcctgaccctgacaagccttgaccacacctgctatgtcatcgtagacataggcaaagtcttcgctttttaaccggccgatattaagaaccatgtcgatttcgctggccccgtctttgatagctgagtgggcttcttggaccttgatttggcttgtgttagcccctaggggaaagcccaccacggtacaaacggcaacacctgtgttagccaataagtcgctggcatacttgacccatgctgggttaatgcaaacggatttaaactggtggtccttggcttctaagcaaagtttttgaatatctgcttcacttgcttctggttttagtaaggtgtggtcgatgattgctgctaagttttctgccatcttgatctctcctttttaatcatcctggcctgggtcagcaaagggtttgcgggctaaaatagctacccagtcgtccatctggttgacttggtcgacaacaaagcccaccgcatctaggcattggatgatgtggtctttcttctctttgatgatgccggaggaaataaatttcccattctcttttaatacccgcatggcttgggggattaagggttcaatgatctcagctaggatattagctaccaccagatcagcttctaagtcaactccttggaggaggtcgccagcttgacctgaaatagtgttctggaaaccgttaagggcaatattacttttagctgaagcaactgcaatatcatccaggtcataggcatagacctggccggcttgcatataggcactggcaatgcttaagaccccagaccccgttccaacgtccaccactgtttgccctttgcggacacattgttccaagagctggagggagagttgggtggtctggtgggttcctgttccaaatgctagacctgggtccaagctaatggtgatctcccggccatcttgggcttggtagtcttcccacttgggaacaatggttataaagtggctgattgccaccgggtggtagtattttttccaggtatccgcccagtcttcatcattgacctgagcgtagtgcacctgatagttttccacctctaagtcaaagtccttcagtttgtccacccggtcttttatctcttgcttgaggcggtctagtcggtcttcttggtggaagtagcccttgatgactacctggccttcgggaaatttggactcatctaaggcccacaagccgtcaaaaccatactcgggtaagttggcaaagtcttggcggtcattgatggacaggccagatgaccctagatccaacaaaatattggaaacggcatcggctgcctcacggttaatccatacgctaaattcgttccactccgtcattttgcttcccttcagtaaatgtcttaatgagtgattcatgtttttcaaagtccataaataacttgtcctggccgaagcggtcgagacttttagctgtctcaagagcctggtctaagttgtgctggtcccagttcaaatgaaagtcatggcgctggctgtcttggacaaagtcttgtaggtctgttttcccagctgacaggactcggttcaaatgtttcaaggtcacatccacctgaccccggtctatgcccaaagtgttgtcaaagggaatggcccgtaagtaattgccaggctggatgtccgattggatggggtcataaaaggcaataacatcttcaaactgtaggtaattggtattaagggtggtcccaaattgatcttggattcccggggctttatcctctaaatcaatgcggaagctaaccaaaacttccactgtttgccggttggaattgttttggaccttccactggaaaaaggggttcaaatcacgcaaaccatgaccaatatatgctgctaaatcttgcttcacaaagtaacctcctataaaagcatcagtgtcaggtcttattttaccacatatcccaagggagtcctataaggagatgaaagacttgactattcgaacgtatgttcctataatacgaattaagcaaacgttagttccctttaggtggtccttatgtatagaaaacaagaagaaattcatatgaactatgataatgagccccggcaggacatcctctgcattgatgttaagagtttttttgctagcgtagaggcggtggaacgcaatctgaacccgctagatgcaaggatctgcgtagtcagccggcccaaccggcaagggggcctcgttttagcctcctcccccctagtcaaggcagaatatggggttaaaacaggcacccgggtttttgacatccctcaaaaggcagatattcaaattgtcgaacctagaatggctctctacctcaagaaaaacttagagatcctaaatatcttccgccagtttgtcagcgaccaggacctccacccctacagtatcgatgaatcctttttaaatgttagccactcccaccgcctcttcgggacgacttaccaaattgcccggaccctccaggataagatctggcaagagatgggcttggtagccaccgtcgggattggtgacaacccccttttagccaaactggccttggaccaccaggctaagaagaaggctattagccactatattgcccactggcgctaccaagacgtccctcatactgtctggaaaattgaggacttggctgacttttggggcattgggtctcggaccaaggccaagctcaataagttggggattgagactgtctacgacctggcccaggcagacctggccaagctcaaagaccggttcggtattatcggccagcaactcttcttccatgctcacgggattgaccggactcaactttccgaccactacacaccccagtcttcttcttactcccgaaatcaaattttacaaaaagactataccgacccctatgagattaaagtagtcatccgagaaatgggggaagaaaacgccatgcgcctgcgcaagcaccaacaaacagcaggcttggttaagctgacgattggctattccaaagatattctggcagccggctttagccaccaggttactatcgaagcgaccgactcgtccaaaaaattacaggactacctggtccatatttttgaccagtattatgactaccaaccagtccgggtggtcaatgtcactttcggccagattgctcccaagcaaggggtccaactcagcttatttgaagataatcaagaccaagtccgggaggagaagaaaatggccgtcattgaccatattaaaagtcgctttggcaataccgctatcctgccagccaatagcctgctagacggtagcatggctatctaccgggacagcttggtcggtggccaccgggcaggtgacaattcagaaaagccaggaagtgaaggtcactaacttaccagctattcaaataaggactaagtttgaaaggaggaaggaagatggcccaccacgacaatggcaaggtctactacaccccagatgaactgggctaccaggaccggggcaagttgaaatggatggggatgatgctgtcagaccacaccgaagccctccagcaagtcaaaaaaactgacaagtccttagctagtcaaaaaatttatgaccagcaagacttgccagaaatcagtcaatatttatatgaggcctttatcgaccaaaaaccggtttggatccaggccaacaccatccaaagggaccgccactaccctagcctcccctatatggtaaagggctataaggacaactttatttacctagccaacccagttggacaaaaaagcaagtgccaactggatgatatccgccatattgaatggatggaccccttagactggtaccaaaaaccaggatcccaagctccttaaaaatagcagactagcaaagacctaattaggtcaactgtttaaagaccttgttaatatcttcttggatgattaaaccatctgtccgtctaggatggatggttgttttattaactacagctagcttgtcaccttggaagtagtccaccaagccagctgctggataaaccaccagtgaggtcccgagtatgattaataagtcagcctgggaaatttggtagatggctgcttggagggtagataaatcgagttgttcgccatataagacaatgtcaggtcggacaatagccccgtctttgggacaatggggtaccccctcctggtctagctggaggtctgaatagccgtaatactgctggcagtccaggcagtaattatctagggtagacccgtgcaacttgtaaacctcctggctacctgctttttcgtgaaggccatcaatgttttgggtcaccacagccaccgacttgcccctcttctctaagtcggcgatataggtgtgggcatagttgggctgggcaccttcaaagaccaagttcttaaaataaaagtcaaaaaattccttggggtggttggcaaaaaaacggtctgaaataatttcttcagccggcacactgtagcctgactcctgcatgtataagccctcagaagaacggaagtctgggatgccactggcggttgacacccctgccccaccgaagaagacaatccggtcagatgaatcgatcatagcttgtaattgttggactttttcatccattgctttacctcctagttagcctcttgcagactagctatagtttcggtcaagtaaaaactagtcctgcaagaaagcccatctcttccttattatgataacatacccttttaaatacaaccaagccaagggggagtcagctgattttgcaagtgattgtatatagcaattaaattattcctcttaaaccagcataaattagcagttaaaatctgattttactatttgttggtactagcaagtaattttctcagcaggaaaagcaagaccagggttagaacataggactttgagtcaaaaagttataatagccaagacataaagcgtgctataattaggaagactatagaggaggttcaagtatgagaattatgatcattgaggatgatcaagttatccgcagacttttggccaagcaaatcttatcttggggctatgaaatttttacttgtcaaaatttcactgatattatgcaagaatttgaccagatcaacccccatttagtcctgttggatatcaatctccccagttataatggttattattggtgtcaggaaattcgtcaaagctccaaagtccccattatctttatcagttcccgcagtgataacatggaccaaatcatggctatgcaaatgggagctgatgactttgtcgttaagccttttgatatcccccttcttatcactaaaatacaagcgcttttgagacggacctatgattttcaaataaaccagtcaacccaagtaatcttgcatgggattagcttaaatttaggaaagagtcaacttgaaagcaagagtagtaaggtggatttaaccaagaccgaattagtgatcttgtaccagctctttcaaaaccaccccaactaccttagtcgggaatctctgatggaagcttgctggcaaggagatgactacattgacgaaaataccctttctgtcaacatatcccgcttgcgcaaaaaattaaagaaattgggggcagagtcttttatccaaaccaagaaaaatgtgggctaccgaattaaggaggagggctaatgggatctttcctaaagcgagaaagtttatcattaagtatcttaactcttagtatactggtttttggactcgtttactggctcctaaacctacccatttacggctttttgctagccactagcttaatcatattcctaagcctagtccttttcggggtcaaatatagtcagtatcaaaaggaggaaaaactaaaaaaggcttaccaagagctagaccaagcctacaagcagttaaaaaacattcaatctcaagactatcaaaagctagaagactatttcattttgtggatccaccaaatcaaaacacccctaacagcagccaaactcctagcaagagatcaaaagttaagagagttggaccccctccttttagaaatagaaaattatagccaattagccatgagtttcctaaaattaaacaagcctgaaacagacttaaatattgcctgtgttagtctggatgaccttatgaagccattgctaagaaagtactccagtcaatttatccagacgaaaacaaaattaatttaccaacctatattaaagaaggtgatcaccgatgccaattggtctcaattaatgattgagcaagtcttgaacaacgctttgaaatatgcggcaggcacttccgtccatatttattttgaagacaaaagtctctttattgaagatagggggggtggggatcagtgaagtagacttacctaaaatatttgacaagggttattccggctttaatggcaaattgaaccaaaagtcaactggcctgggcctctttattgtccaaagcattagtcgccggctcaaccaccccattcaagttgagtcaaacataggccaaggcagtcgttttcagatcgaattcccagaccagccccaagccaatttctaaacttacagttttgtcagcttactgttagattagatgaaggctgaaaagactggaagtagttatcataaacttatcaaagttagaaagaaggagccaaaatgctactgcaagttaatcatttgaagaaagtttatggtagccagtcgcaacaaacccaagccctaaagtccatccaatttggtgtcaaagaaggagaatttgtcgctatcatgggggaatccggttcgggcaagtctaccttattaaatattatagccaccctggaccaggccactgaaggtcaagtcctaattaataacctagataccagtcagtttaatgaaagtcaactagctcaattccggcgcgaacgcttaggctttgttttccaagattttaacctcttggatagctcaagtaaccaagataatatcctcctgcccctagtcttatccaatacccggcctaaagatatgaaaaataaactcaaagctctagtcccatcgctcggcattactaacctgctagacaagtatccctaccaaatttcaggtggtcagaaacaacgggtagccattggacgtgccttgatcagccagcccgatttaattctagccgatgagccaacgggagctttggattcaaagtcatcgcaaatgattatggagctcttccaaaagattaatggtgccggccaaaccatcttaatggtgacccactcgcttcggtcagctgcttatgctaagcgagtcctcttcatcaaagacgggattgtttaccatgaaatttaccggtcaaatcaaggcttgcagaccttccaagaccgaattgctgactctttagcagtcgtcaatagtcggggtgaataaaatgaaaaataaaatattgcgacagcttagctggcaaaatttgaaagcccaccgtcaaaccctagtcccctttgtcctatcttcggctatcttatccggtttactctatttgatcatttccttagtcaacaacgattatgttatccgccgccatgaagtcttgcagacccttatggttatggcgggggtcctaaccacaatatttactgccatatttatcatttatgccagtctctttatctacaaacagcggcataaagagataggcttattcagtgttttaggtatgagcaagaagcatattcaaaagatgacccggctagaattgctcattcaatggctactgaccttagtcttagctatcccgggtggttacctctttggtcatttggttttcatcttcctcaaccgcttaatgcaagacactggtttccaatacatgaactatccttttgatttaaccgccatgctagctgtcattatcattacgggccttatctttttaactgtctatggcatccaccactttaaagtccaagtagctaatcctattcagctgattcaagaagccaaggctagtggaaaggagcccaacaacaacttcttagcccttattgtaggccttataatggttggcttcggttattatttggccatgactagtgctggcttagtccagtctctctaccgtatttttgttgctgtcctgctagtcattgtaggctcttacttcttactaggctctttaagtatttttatcctaaaaggcttaaagaataatgattcttattactataaggcagaaaacttcctatctctatctgggatgctttaccggatgaaggctagcgccattagcttaaccagtattagtattttatgtaccggcttaatgattatgcttggtatgaccctcactgcctaccggggaatggaagaccaggttgaccaggccctagaagctgactatcacgtctcctattataattttgataaccaagaccaaaaagactttaatggtatagtggacaatattgtagctgacttaaaccaagagctagcaattgaatctgttcggacttattgttctagtcagatttttttcgaactaaagggcagagaatttcgacccctcgatatagataagagctctccccaaaatgcagggcaagccaatatatttagacaagaagattttaatgcagccttcgatgaaaatatccaggtcaataaccagcaaattggcctggtagctaatgctgagcgttggaatcaatttgaccaggtaatcttcgcaggccaaagctatgaagtcgtccccctccccgatcatggaatgggcaatattgccattgactttatgcagattgtcctcccgcccaatttatcctttgaagcagcaagtcaagcctaccctagatatgccctagatgaccaagaaccccttccccttgtagtgggccagcacgccaatattgacgggcaaagtgaccaagctgaccaagcaggcatagaagaaagcctagctaacttacaagctaggtatggtgttgacattaccagtcgttttggagcaagtcagatcatttatgctgttaacggtggggcccttttcttgggaatcctcgtcagtgtagttcttttagtaggggtcttccttataatctacttcaagcaaatctcagagggccaacaggacagggataattaccaaattatgcaggctgttggcttaggtcagcaaactattaaaaaagccattaacaaacaaattatatggttatttctcctccccttgttggttgcgatcacccatatggctgtctcttccactattatctttaatatcttaggcctgattaatgttcgagattgggggcaatttatcactagctacctgctggttatcgtcttctttagcctggtttatggcttcatctactggctaacttcacggacttactatcaaatcgtgagtcaatccaagtaaaataattttaaaaagtgacctcatgccaaggctgaggtcacttttacttggtaaataaaatggggtttgcttttcctaacctatttaaacagcaaacaaactaagctaaatcttttgctgttagtttttaagagcctgtatcctttctttacaggagatggattgtaaaaatcaagtcggccaccttagtgtaagaccacaaaggtcaaaaataaagagtcaaaagtgaaaagccacataagtcccccgcaagaccaaaaccctagcaaggcttctccccaaccttcttttatccaaagattggggcaagcgggcttgctagggctagtcttgttcagcattaaaagttaagggaaagctgggctagtcttcatccaagtccaaaacggccataaaggcttcttgggggatgtcaacattccccacacttttcatccgttttttaccttctttttgttttttcaagagtttttgccgccgggtcacgtccccaccatataacttggcggtgacatccttacggtaggccttgacagtggaccgggcaataacattgttgcccactgcagcttgaatggggatttcaaattgttggcggggaattttggctttcaactggtctgctatagcccgaccccgttcataggaaaagtccttgtgtacgataaagctcaaggcatcgaccgggtcgccgtggatcaagatatccattttaaccaagtcactgaccttgtagccgtcttcttcatagtccagggaagcataacccttggtcatggacttgagcctgtcaaagaagtcaaaaactatctcagacaagggaatagaataaatcacattgacccggatatcgtccaggtattccatggtgataaagtctccccttttgcgctggcagatctccatgacaggtcctacatagtcatttggcacagtaatagtggctttcacgtagggctcttcaatggattcaacttcgccagcatcgggcatctcagatgggttagaaacttccacttgctggccgtctgttttattgacatggtagataactgacggagctgttgtgatcaagtctaggtcaaactcccgctccaagcgttcctggataacatccatgtggagcatgcctaagaagccacagcggaagccaaatccaagggcctgggaggtttctgcttcaaattgaagagatgaatcatttaactggaggcgctctaaggcctcccgcaagtcttcgtaatcacttgaatcggtcgggtacatcccgcagtaaaccattggattcatctggcggtaacctggcaaggcttggtcagtcggtctgtcttccaaggtaatggtatccccaacccgggcatcccggactgactttatattggccgtgatatagccaacatcgcctaccattaaataatctctttcaatgggtttgggggagaaaatccccagttcagacacctcataagtcttgccactgttcattaatttaattcggtcgcctttttttacgctaccttctacgattcgaacgctcaagacaacgccccggtaggaatcataaatggaatcaaagatcatagccttaagggggttgtcaatatcgccacttggggctggcaggtctgtcactattttttctaggatttcttcaattccaatccctgacttggcactggcgcgaacggcctggcttgagtctaaaccaataatatcttcaatttcttgtccaactcggtctgggtcagcagccgggaggtcaattttattaattacaggtaagatctctaagtcattgtccaaggccaagtaaacattggccagggtttgggcctccaccccttgggcagcatcgacgaccaaaattgccccttcacaagctgccagactccgggaaacttcataggtaaagtcgacgtggccaggtgtgtcaatgaggtggaaggtgtattcttgatcgtccttggcctggtatttcaactccactgtgtttaatttaatggtaatgccacgttccctctccaagtccattgaatccaggagctggtcttgcatttctctttcagcaaccgtttcagtgacttgtagaatccggtcagccagagtggatttcccatggtcgatatgggcaataatggaaaagttacggatgtttttttgacgttttcgcgcttggtctttgtccatgtcattccccttttctagacatcagtctttacaattatatcaatcttaaaccgggattacaattattggtttttcccaagcaagacagacaaagccccccaagttagcttccacttgaggggtcatgggtttaatctttatctttaaaagcatctttaaactttgagaagaaagaaccttcctgcttgtcttgctctttgacctggccaatatcgccttcttgggcaaattctttcagcaattcggactggcgttcatttaattttttcggcacgacaaccttgactgtgatgtgctggtcaccgttgctgttgccgtgaagcttgggtgcccccttgcctttgatccggaaggtggtgttaggttgggtaccggctgggattttgaacttgaccttaccgtggacagttggaacttggatttcatctcctaagctggcctggacaatattgatttcttggttgtagtagatttcagaaccgcgccggtcaaagatatcggacggtttgacccggaagacgataaacaagtcaccataaggaccacggtttttaccagcagaaccttggttctgcaaccgcatttggtggccgtcttccacaccagcaggaactgtcaccttgacactgtgacgttttttagtcgatcctttgccgtggcacactgagcatttttccttgatttcttgacctgttccgttacagttgggacaggtttgctgggtcatcatccggccaaaaggagtgttccgttctgcttgaatactaccagaccccccacaccgtgagcaggtttggggactggtccctggcttggcaccggtcccgccacagttgtcacattcttcctggcggttatatttaatagtggtctccttgccaaaaatggcttcttcaaagtccaagtccatgacatactgcaggtcatcaccaggtcggggggcagaagggtcccgtcttctgtttccgccaccaccgaagaactggtcgaagatatcttcaaagccgccgaagctagagcttccagaaaagccaccgcctgctgagccaccactgaagttcggatcattagcagcatggccataacggtcataggcagcccgcttgtcttcatcgcttagggtttcataggcttcagagacctgtttgaatttttcttccgcaccaggttcatcattaatgtcggggtgatattttttagagagtttccggtaggcctttttgatgtctgcctgggatgcatctttggagacacctagaatgtcatacaagtcttctttttctggcatagttttcctccaatactataaagtaagtatcatagaaaaagccaagcactctgtcttggctttttcctgatgtcaagttagatgcaattagtcgtcgtcaacttcttcaaaatcagcatcgaccacgtcatcgtcgtctgagccggaatcatcagacccagcttggtcatcttggccggaagcttgttgctgttgttgggcttgctcataaagcttaacagttaggtcttggacaatttcacttaatgcatcgcgtttttctttaatagcatcaaggtcatcgccttcaagggctgatttcagttcttctttagcgtctttcgccttttgggcttcagactcgtcgactttgccttcaaggtcatctaatgttttgtcaacttggaagacaagttggtcggcttcattacggaggtccacttcttcccgacgttttttgtcggcttcggcattttcttccgcatctttcaccatacggtcgatatcttcatcggaaagaccagaagaagattttatggtaatgttttgttctttaccagttccttggtccttagcggaaactttgacaataccgtttttgtcaatgtcaaaggagacttcaatttgagggacaccacgtggggctgcagggatatcagtcaattggaaacggccaagagttttgttatctttggccattggtcgctcaccttgcaagacgtggatgtcaacagctggctggttgtcggctgcagtggagaagacttgggacttgctggttgggatggtggtgttccgttcaattaaggttgtgaagacaccgcccatggtttcaatcccaagtgaaagtggggtaacgtcaagaaggacaacatctttcacatcaccagagataaccccaccttggatggcagcacctaaggcaaccacttcatcagggttgactgaccggttcggttctttaccagtttcagttttgaccacatcgacaacagctgggatacgggtagacccacctactaggacaacttggtcaatttcatttttgtcgatacctgcatctgacaatgctttacggactggttctttagtccggttgaccaagtccaaggtcaattcatcaaacttagcccgtgttagggattgttccaagtggagtgggccgttatcccctgctgtaatgaaaggtaggctaatttgagtttggctggtgctggataagtcttttttggctttttccgccgcatctttcaagcgttgacgagccatcttgtcagttgacaagtcaatgccgttttcttttttgaagttttcgaccaggtagtcgatgattttgttatcaaaatcgtccccacctaactggttgtccccagcagtcgagaggacgtcaaaaacgccatcacctaactcaaggatggaaacgtcaaaggttcccccacccaagtcaaagaccaagatgttttcttctgagtcttgtttttcgaggccgtaagccaaggaagcagcagtcggttcgttgacaatacggtccacttccaagccggcaattttaccagcatctttggtagcctgtctttgggagtcgttgaagtaagctggaacagtaataaccgcattagtgactttttcaccaaggtagtcttcagcgtaagattttaagtgttgcaagatataagcagaaatttcttgaggggtgtattccttcccttcagcttctatcttgcgatcttcacccatgtaacgtttaaccgacatgacagtgtttgagttggtaatcgcctgacgtttggcaacttctcccacttgaatttccccatctttaaaggaaactacagaaggggtggttcggttcccttctttgtttgggataatggtgggttcgccaccttctaaaacagcaacagcagagttagttgtccctaagtcgataccaataattttagccatattatcaatctccttcgtacaaattttaatttagtgaaatggatacaaggtattttaaaagttagcccatttattcaacaacggtaactttagcaggtctcaagacccggtcatgaagcttgtagcctttttcaaagacttcagctacttgattactttcttgaccctcttggccaggcacttgggcataggcttcatggaagttggggtcaaagtcctctccggttggatcgatcacttcaatctggttgttagccaaggcctgcaagagactgtccttgaccatttctaaaccttttttcaggttttggcccgattcatcttgaacttcaatttgcaaggccctttctaagttatcgatggatggcaaaacatccttggccaaatcttgagctcgaaagcgttggagctcttcccggtttttggcatgccgtctttgcaagttttggatttcggcctggagacgaagaactttttcttccaaatcttccttttcagcctctaattcttctatacggctgtctaggccctcatcttgaccttggtcggaactagctaggtctgagtcttggtctagtccttcgtcttgattttggtcttctgttttgtcctcactggaggcaacagattcttcttggttcacattttcttcttcatgactcaagaaaacccctcttttctaatggatataataattcaagagcgcttcaacgagctcaattttaaaaccttcaatcacgccaagtgtcttggaataaggcatattggttgggccaaggatggcaatcaggcctgacccaatattaccaactgaataatcaacagtgatcaggctcaggttattaaaacgctcatcatttaattcctcaccaatccggatgttaaccccctggtcagctaagttgaccaagcggcttaagtcatgttcatggtcttcaaacaagtcaaacaagcccttgatttggtcaatccctaaatcctcggtaaagttgaacaacttgttcttaccagatatgtggacttggttttggtcggcttgttcaatactgttaataaccgggctgagtaggctggatatatcccctagtgagcgacgaacaagaaagggaatctcccggtctagcttgtcatgaacctggctaaggagaaggccttgtagctcttgcttgagtaagtcagacagccggtcaatgaggctacgactgactcggccccccacccggaaaacgctactcttaatggtttgcccgtctgtttccacaattgccatgacctggttagcattgaccttaaccagtttgagatctgtcagccgggattctagggctttagggcctaagacaatggctgtatagttggtcaagtctgacaaaatctgggctgactggttgacaatgtcatccaattcctgaaactgcttggacaactcctgggcaatccgggcaatggagtcctgaggtggctgttccggttgcataatatggtctaggtaaaaacggtagccctgcatggaaggcacccggcccgaagacaggtggtttttttgaataaaacctttctcctctaacaacttcatctcattgcggatggtcgccggactggcttcaatatcggtttgctgggcaatggtttgggagccaactgcctcacccgtattggcaaaaaaatggataatattttctaaaattgaaatttgtcttgctgttagcatgttactcatcctttcagcaaaacagtccaccaagttcccctaaacaagcttcggtttaacttggttaatacttatcattaaaattagcactcacaagacccgagtgctaacttcaattcttattttaataaaagaccggctagctgtcaacaataatgttccaattatttagcaaaaaagcccttaatataagcagtcagggtgctaggtctgctagtctcttttccgagtccttttggtctttacccagctggtcaatcaagtcctggctagagtcgaatttttcttctgaacgaaggtagtccaaccacttaattctaacattttccccgtagatcatttggtcaaaatcaaaaatatttacctcaatagactggttgttgcgaaagccaaaggttacattgtagccaatagaagccatgccgccgtaccactggccattgacttggatagccacggtatagataccgactccgggcagaaagacttggggatggggttcaatattggctgttggataacccaagtcccgtcccctggcttcgccatggatgacatagccgcttgtttcataatagtaacccagaagctggttggctgctttgacctggccgtttgcaatcaattgccgaatccgggtcgaggaaattttgccttggtcatcggaatacatctggacagtcttgacctcaaaacggccttgtgccagtttaggcagtctttccatattggcaatgtctttcttgccataagtatagtcaaaaccggctaccacatatttagcatgccagtctaccatatagtcttggacaaattcttccggtgtcaaggctcccaaactagaggtgaaatccatttcatataaaatgtccaccccaagtcgctcgatcaagtctaacttacgttcacgggtagttaagtaggcatgccggctgggatcatatttttggtaaaccaaggagggatgacggttgaaagtcatgaccacgctcgttaagccctggtcttgggctagttggaccccttctttgatcactttggcatgtcctctatgaacaccgtcaaaaaagcctaatatcaaaacgatctcatccctgtgaaggtcagctggctggtaagggtgatgtattttcttaacttgcaattcgacacctacatttctgtccttaatactttcttaggtttcaaaagatctggtttttctggatgagcctggtaaatagctaccgcctggttttggtaatacaaaaccagtggataggtctgggcatagtcagctcggctcaataaagccccatgttttacccgggaccattcttcacttgacagctgctgggagggcaagtgactaagggctctttcgatgggctctaagcagtcagcaacttgcccctggtttaccaggtcttctagctggttgagggtcaagcagtcctctttggtaaaacccccgctccctagccgggtcaagtcactcatataaccaggatatcccaactctcgggcaatatcttcagccaaggtcctgacataggtccccttactgcaaaccaccctaaaggaaaagctagcagtctgcttcattgggtcaaaggctaagtcagaagtccggtctaaagcctgaataactaccttcctctccggccggtctacggcttcattcttacgggcatagtcgtataaacgacgtcccttgacccgaacagcggaatacatgggtgggacctgactgacctcccctataaagcgattgagaacacggtcaacttgttctttatttaagtcggaagctgtgactggagcctgggataggatgtctccactcccgtcctgggttgtggttgactgaccaagttccacttgcccctggtaggtcttagaagactctaccatatattctaacatcttggtccccttgccaattccaagggggagaacgccatcgacatctgggtctagagtaccagagtggccaaccttcttagtggccagtatcttcctcactttatagacacaatcatggctagtcattcctctttctttccacaaggctaagaggccatccacgaatctcacttccttttttcttgctgaataaatgactatgtaagggcataaggccaggtatttgacctggcccaacccaaagacttacttaaggcaaacaagttagtttgaatcttcctggtgtaattcattgataatttggtcaatccggttgccgtattctaaggattcgtcccggacaaaacggatttcaggtgtcttaaacaacttaatccggttgccaatttcacttcggaccaatccacttgccttgtcaagtccttcttgggtttcagtcttaacttggtcatcatcggacaaggtggagtagaatattttagcgtgttgaagatcagccgtcacttcagcatccgtgatggtcaccccatcgacacgaggatctcggacctcatttcgcaaaatatccgttgcttcacgcttgatctcttgggcgacacgtccttgtctgtggctcggcatagggtcacactccttgtctatcttggtaattcaaccatttcataagcttcaataacatcatcaactttaatatcattatagccttcgatggtaaggccacattcaaagccattggaaacttctttagcatcgtcttggaagcgtttcaaactagatagttctccttcatggatgactaccccatctcggattaaacggactgagctggatcgtttaatcacgccatttgaaacgaaacagccggcaatggtcccaaccttggagacattaaaggtttcacgaacagtagctgtcccagtgactttttcttcaaactcagggtcaagcatccctttcatggcttgttcaatttcttcaatggcattgtagatcacacggtgggttctgatttcaacttcttcccggtcggcactttcttgggcctgtggggtcggtctaacgttgaagccgataataatggcattcccagcagaagcaagagtaatatcactttcattgatggctcctacccctgtgtggatgatgttaatcttgactccttccacatcaattttctctaaggaggaaaccaaggcctcaactgacccttggacatcggctttgacaatgacattaacttcttttaactcgccctcttctaagctatcaaacaagttgtccagggtgattttttggctggccttacgactagcttcagtggctgcattggcccggcgttcaccaacttgacgggctgttttttcgtcttcaaagacgacaaaacggtcaccagcttgaggggtgtcgtttaagccggtaatttcaactggagtggacggtaaggccttcttaactcgtcgtcctttgtcattggtcatggtccggatccggccatgggtattgccgaccacaatggagtccccgtggtggagggttccttcttggaccaataaggttgcgacaggtccttgagccttgtccagtctggcttcgatcacactaccgatagcgttccggcttggatctgccttcagttcttccacttcagcaactagtaggatcatttccaagagttcatcaagattttggttaaacttagcggaaatctcaacaaagatagtgtccccgccccagtcttctgggatcaattcataggcagctaattcctgcataactttttgagggttggcatctggtttatcaaccttgttaacggctatgataattgggacacccgctgctttagcgtggttaatggcctcttcagtttgaggcataaccccatcatcagctgccaccactataatagcgacatcagtaatatctgccccccgggcccgcatggtggtaaaggcagcgtggcctggggtgtccaggaaggtgattaatttaccgtctacttctacctggtaggcaccaatgtgttgggtaattcctccagcctccccttctgcgacattagcctcccgtaaggtgtccaagagggtggttttcccatggtcgacgtggcccattatggtgactgccgcaggccgggtttggaggttttcttctaccggttcctggtcgaagtagttatcgaagtcagcaatatccacttctactttttcttcggcttccactccataatcagctaggatcagttcaatagcatccccatctagggattggttttggttggccacaacccccatcataaagagttttttaacaatttcggctggttcccggtggagttttttagccagttcaaaaacagtcatcccttcagaatattcaactgactctggtagaggtttgtttttgcgaggggttgggtttgcttgctggttgccctgtttttgcttgtttcgtttttgttttttacggttgccagctggtccgccatggatcccgcggtgctgtctagaactccgtttttgcttacggttcttgccttgttcgcctttttcggtttcgtctgtcgttcttttacgcgggttcattttggtgttttccttgccttttccctgtttatcttgcttgccttgtttcttaggagtaggtttattttttgcttttttgttatttgctttgccttgtttgtttcccttagttggcttgtttttggaagcatttttgcttttgcccttgccttgcttagattgattttggcctgacttgccttgcttagggttattttcggtcttgttttgtttcgaattattgtcaggcttgttttgcttatgactctgattttgtctatcggctaaggcattcttgatcgtttgtttatcttggtcgctaatagaggccatatgacttttaaaggtcaagccggcttcattagctaactctaatacctctttgctagggaggtcgagttctttggcaaattcgtaaacacgcattttgctcatacaatcacctttctatcatctgtgtaaactggcaaaagacttggcaaaccccctatccgtgagtgaacaagatttgcggtttttgccaattgctcgggaaatttcttcatttgtatagtctaaattcaaggctatttcataactgtgacacttgtcggtaaattgtttaatggaccttggcgaagcatccttggccagaatgacatagtggccccgcttggaccggatggattctaaaacaggtccttgaccggtcaccaactttcctgctctttgagctaagcccaaaagatttaaagctttatctttattgttcatttaataactctgcccttgccttagtgtattcaacgtactctttgagttcctggtaaaaatcatctggaatttccgtatttaaggcccgggctaggacatcttttttccggccttcttcgataatggaagggtcaactgaaacataagcccctcgaccatttttcttgccggtcgggtcaatggaaacttgaccttccttgtcacgaacaatccgaaccatgtcttttttgggtttcatttcatttaaaataacgcatttccgcatcgggatttttttctttttcaagctaccagctccttaagcttgggtctgatcgattattctaaacaggtacttagcctattcatctaggtctaggtcacttgcttcgtttacgtcaagggtagattcatcatcttggcttagctgggccgagctcgagtccaaatcttcttcctctcctacactggcttgaccatcttctaactcgtccaaaccttctagatttgtcggattttctgcttggtctcctaattcttgactttcttggttaaggctatccgctactggttcagctcctggctcagcttcttgtcctctttctaggccagtctcttcaacggatggctcagcttcacttggctctacttcttcttcaacctggtaagttccaccgtcttcaaaggagccatcttccaaattaacctggctttcaggtaaaatatcaattttgtagcctgtcaatttggcagctagacgaacattttggcctttcttcccaatggccaaggaaagttggtagtcgggaacgacaacccggcaagaatggtcatctgaactaaattggacagccaagacttgggctgggtttaaggcattttcgataaagatacggggatccttgtcccattccactatgtccatgttctccccatttaattcatcaacgacaacttgaacccgggctcccttggcaccgacacaagtcccaacagcatcaacttcgctgtcgtgggaagttacagccagcttggaccggtcccctgcttctctggcaatagagacaatctcaacggttccatcgtaaatctcaggaacttcttgttcaaaaaggcgtttgattaggttggggtgggtccgactgacgaagacttgggggcccttggtagaatcctccaccttgctaacatagaccttgatccggtcgtgggaattgtaagtttcgtcttcaatttggtcacgcttggacaaaacagcttccaccttacccaagtcaacatagataaaacggttgtcttgtctttcaaccgtccccgtcatgaggtcatcttggtactcaatatactcattgtagataatggaccgctccgcttcccgcattctttgcaggacaacttgcttggctgtttgggctgctatccgaccgaaagacttgggtgtgacctcaaatttgatcttgtctcccacttcataagcccggttgatttctctagcatccaccaaggcaatctgactattggtatcttctgcttcttccaccacttccttgacctggtagacagtaatatccccagaagcatcattgaaattgacctccacattttgagaggtgccgtaatttcttttatatgctgcaaccagggcgtcttccaaggcttcaatgacaatatcttttgaaattcctttttccttctctaaaacttccaaagcgccagccaattctttactcatagttctctccttcagtctaaaattcaattgctagtctagcttttgagatattatctcggttaatcacaacatcttttttacgggttttgaccttaacagtaagggtaatggtgtcttggtcgacttcttttaagtgaccttcaaatgcattatcgggcccaatcatttcatacaatttaacatgaatataagacccaactgcttgcttgaggtcttctgccgtcttcagagggcgctcagcaccaggagaagacacctctaaatagtatgcttgagggataaagttagtctcttgctggtccaggagtccacttaattgttcactgaattgggtgcagtcatccaaacttaccccaccagcttggtcaatatagacccgcaagaaccaattctgaccttcttttaagtattcaacgtcaacaatctgataacctaggtcctcagctaagggtttcgccaagtccaaaactttatcttggatcttcaaagccttcacctctttaatcaaaaatttgtcatcaaaaagagtgagcgaatgactcgctcactcctttcctttattttcctttagcacaacatctattataacaggacttttagcctgttgcaagtttgggttaaaatctaatgaccaggttttcctcccattgacttgttaaaagtcaaagagggaaagttggttttcgtccggcaggtggtctaaaacgtggttattgtccaggtagtccatgaccgttttcgacaacttgccccgttttgataggtcttccttggacaagaagtcgctgtcctccctggcatcaatgacagcctgggcggcactggaccccaaggaagggactgccctaaatggagcacgaaggccattgtcttcgatgacaaagtctttggcttgggacttgttgatgtccaccatcttgaagtcaaaaccccgttcaaccatttcattggctacttcaaggacggtgagcaaggctttgtccttagctgtggcagttttttctctttccttgtccctgatttccttcatagcccctttaatgccttccttgcccttgaccatagcaattaagtcaaaatcactagcccggatggaaaagtaggcagcgtagtagtaaagggggtagtggactttaaagtaagctaccctaagggccatcaagacataggcagctgcgtgggctttagggaacatgtacttgatttttttgcaggattcaatataccaatcaggaacatcattttctttcatggtagcaatccagtcatcttgcaagccccgacccttacgaacaaattccataatcttaaaggccaggctgtcttcaagaccttggtgttgaaggtagaccatgatatcatcccggcagccgatcacctcggacaagggaatgttgtggttgcgaattaattcttcagcattgcccagccaaacatctgtcccgtgggagaggcctgagatctgcaagagttcagcaaaggtagaggggtgggtttgctctaacatttctcggacaaattgggtaccaaattcaggtactccgagagttccggtattggagaaaatttgctctggggtcacccctagaacttccgggcctgagaaaattttcataacatcttcatcacttaccggtatttcttgagggtcaaagccggacaagtcctggagttttcggatcatggtcgggtcatcatgtcccaggatatccagcttcaagacgttttcgtcgatggagtggaagtcaaagtgggtagtttgccactcagccgtctggtcgtcagccgggtactggatgggggtgaaatcaaacacatccatgtcatccggtatgacgataatccctcctgggtgctggccggttgaccgtctcactccggttaaaccatctgacagccggtccacttcagccgaccggtagtttatctgcttgtccctttcataacccttgacaaaaccaaaggccgtcttgtcagcaatcgtcgtgatggtccctgcccggtagacatggtcttctccaaacaaaaccttggtatagttgtgggccttggcctggtattcacctgagaagttcaaatcgatatctggcaccttgtccccattaaaaccaaggaaggtttcgaagggaatgtcgtggccgtctgattccattaggctttgacattccggacattttttggcctctaagtcaaagccggaccccacttccccatttgtgaagaattcggtgtgctggcagttaggacagcggtagtggggcggtagtgggttgacttctgtgatcccggtcatggtggccacaaagcttgacccaaccgaccccctggaaccaaccaaatagccatcttcaacactttttttgaccaatttctgggaaattaagtaaatgacagagaaattgttgtcaataatactcttcaactctttttcgagcctttcctctacaatacttggcaaggggtcgccatagagagccttggcttgcttgtaactcatctgacgtatctcttggtccgacccttccattttcggggcatagaggccttccttgacaggagagattgattcgatagaatcagcaattttttgggtgttggtgaccacaatctcataagcctggtcctggcctaggaaggaaaactcttctaacatttcatctgttgttctaaagtggacttctgggttccgggctttggagaaggctccctttttggcagtttccaggaggatatcccgtaaaacggcatcttctgggtttaggtagtggacattccctgtagctaccacgggtatatcaagttcatggcctattttaaccaggttttcaatcatttcttcaagggttgcctcatccttgattaagtcccggtccaagaggtcaatataggctgacttgggcataacttcaatataatcatagtcctgggcaactgccaaggcttcgtcatagcccttttgcataatagcctcaaagagctctccctgtccgcaaccagacccaaccaaaaggccttcccggtacttgctcaagatagacttaggtatacggggaacccggtagaagtagttgacatgggcgtgggagacaattttaaagaggtttttcaagcctttttgattcttgaccaaaatactggcatgggttggccgggcctgcttgtaagcctcgccttcccccacctggctattcaagtcttggtggctagtcatgtcatattggtctttggcttcttttaagaagatccacaagagtttagccgttgactccgagtcatagatggcccggtggtggtgttctaaggccacgtcataccgcttagccagagtgtttaaccggtggcttttcaagtttgggtggagcatgcgggacaattccaaggtatcaatcacaggctggtcagcttgtcctaggccatgtcgttggtaggccgtattgataaagcccatgtcaaaggaagcgttatgggcgaccaagacagtgccttctgaaaaggcttgaaaggcatggaggacttcgtcttcacttttggatccttggaccatgtcatcggtgatcccggtcaaattggtcgtagtctcagacaagggctggcctgggtcaataaattcttggaattcagaaacgatttccccattttccatcttcacagcggccaattcaatgatttggtcataacgagccgatagtccggttgtttccacgtcgaagaccacataagttgcctcttccagctttatatcggccggattgtatgctaccaattcgccatcactaaccaaattggcttccacaccgtaaagaattttaacaccagtgtctaagccagcataatgggcctctgggaaggattggactacagcatgatcagtgatggcaatagccggttggtcaaaagcggctgcttgcttgaccaaatccttggccggcaccaaaccgtccatctgactcatggtggtatgggcatgaagttccaccctcttctccccttccttagccaggtcccgccggggttcttttttgacctcttggatgtcttgggccatgacaactaggtctttgacaaaggtatcttcttgaacactgcctctaaccttgagccacattccctcttggacttggtcaaatagggcttcgtcagaagaattattagagaattttttgaataggaaggaagagctatagtcggtcattttaaagagaaggagctttctatctgaccggagggatttgatttccacatcaaaaacgtatccttcaaaggtcagacggctctcttcttcttccacatcaaccatctgggtaatcgtttcgtggtcagggatggcccggcccatcttcaaggcctccgacttggctttggatcccccttcttctttcttttggctggccttgataaattggttggttagctcttgagacaaggcctggtctttttcttctttttctttacggaaggcggcaatttgatctgaatttttctgggcatcgaccctagccttgattttaaagtggttgggaaagcccacttgctggtagccagcttggatccgaggtaggaagtcatggtcaaacttgtcccgggtcacttcatggtccaggtcaaagtaaacttgcttcccatctagataagggagggtcttgtctagtaagtcattgcaaaggggagaatcgactccgctaaacttcaccgccttaggccaatagtcctggaggaggtcctggtcaaaactgtcatcttgggcatcaacccttaaatggatctggttgacttctgggatatgctgcaagagggcagactccaaaacttggaagtccttaaaagggaggatctgaggaaattggagggtcaggtcccaggcttgttgagccttgtaaacaacaatttgcttcaaactgccggctttaagaaggggtcggtcttgtaggtgttcttctaagtggacttgctgcatcaatacttgatacatttctttttgattgagtgacatctttgccctgctttctaatgagccaaaaagggccagatacgaaagtcctgaacccttttaaagctaattttgcaaatgatttcttagtcttctttaaaagattgaatagcgtccaatacttggtctaacttagcttctttcatttgaccggtccgtcttgagctaacttccactataccatccttggcttttttgccaatggtgatttgataaggaatgccgattaattcggcatcggtaaatttaacccccggtctttcattccggtcatcaattaagacctcatagccctgggcagtcaaggccgcctcgatgtcttttgtcagctgaccttgaatatcgttggtccatttaatgggcaccaagtggacctggaaaggagctaattgttctggccagacaatacccttgtcatccgaattttgttcaacaacagctgacaagagtcggctaaccccaatcccgtaacttcccataatgaccggagttggtcggccgttggagtccaagacggttgcctgcatggcttcactgtaaaaggtgcccagtttaaagatgtggcccaattcaatccctttttggaagacaagttgacctttttggtctggagaaggatcgccttcttctaccatccggatgtcagcataagtacagtcgtcaaagtcccggtcggggttgacatttttatagtgtttgccttcctggttggccccagtgaccgtattagccatgtctttcacgtgatggtccaagaccactgttacttggtcagacaagccaattggacctgcgtagcctgggactgtttggaaaagttctctgatttgatcctcactagccgggtcaatttttttcccatccaaggccattctgaccttcacctcattggctgtatggtccccccgggtgatggctaggaccggaattttttcgtccactataaacaggacactcttcaaggtatctttgaggctcagcttcaagaaggaagcaaggtcttccatagtggtcacaccgggtgtctccactaattccaggtctaaggcatgggcttgacttggctcagcttggtagtagctttctgccatttccaagttggctgcatagtcactctggtcggagtgaacgacaatgtcttcaccggcatcagatagggccataaattccatggagtctcgtccccccatagcagctgcatccccaatgacagcccggtagtttaagccaacccgggtaaaaatattgtggtaggcctgcttcatggcttcataagactcatccaaactagcatagtcttcatggaaggtgtaggcatctttcatgataaattcccgtcctcttaaaagccctgaccgaggccgtttttcgtcacgaaacttggtttgaatttggtaaagggagaggggcaatttcttgtaagaatcgatggtgttgcgaatcaagtcggtaaaggtctcttcatgggttgggcctaagataaagtcccggtcgtgacggtccctcagcttaattaaatcctctccataagaaatataccggccagtttctttccataaatcagccgggatgaggccaggtagggtcatctccactgacccgaccttgtccatctcttcccgaatgatagcctcaaccttgtctaagacccggcgtgccaagggcaaataagcgtaaacacctgctgccacttggcggatgtagcccgcccttagcatcaactggtggctcttcacctcggcatcactaggcacttcccttagagtcggtgagaataatttcgattgcttcattattgccaaacactccttcagtatttaaaagaaaaattgcgtaatatcattccaagtaacgaccaacatcaagacaaccaagaaacctgccccaaccagggtgaggacaatttctttttcctggcttaactgtttaccccggatggcttcaaggaagttaagcagcaacttcccaccgtccaggcctgggatagggattaagttcactaaaccaaggttggcactcaaggttgcaaaaaggtttaaaacggccaagaagcccccagtctggaaggctgacccggtaaccgcaaaaatggcaactggcccaccgagttggtctaggccggcactaccggtgaacatctgtcccaaggcttcaaaaatcattaggataatggtccaggtttcggtaaagccaaaagccaagatggaggaaatggaggtctccatgtcccgcaaaatcccaatccgggcatattgactcccatcttcaagactagcatactccggtgtcaggctaacttgcaaggtctggttctcccgttggacctccaattcggtctcttcttccacattagaagtaatagctgccgtcaagtccaaccaggattccaccggctggccatcaacggatagaactcggtcgtctgcttgtagccccgcctggctagcaggagaatcagcttgaacgtccccaacaacaggatcattacttaagaccccaccctggataaaacctaaaagaataaaagcaacaatagccaggataaagttgtttaagggacctgcaaagttggttaaaatccgggccatcaaaggggcatggttaaattgcctgtctaggggggcaatttggacttccaccccattctcccgcttgatactagcagtccgggctactttaaatcttgtctcctcttcttccccgaagacatggcccttgaggtagaggtcttgctccaggtcaaagtcagtcatctgaatcactaatttatccacctggtctaggtcatcgtttaaattaatcaaggtcacccggtcgttttcgtccagggtcaagtaggcctgcatgcccggtcttaagtcttcttcctcttcataaccagccatcatgacataaccacccaggggcaagaggcggatgacataggccgtctccccttttttaacactaaaaattttagggccaaagccaatggaaaattccctgactaagatccctgaccgtttagcgaagtaaaagtggcctaattcgtggaaaaagaccaaaagcccaaagacaacaataaatattagtatactttcgatcatataaaaattcctttcagctaaacaatgcccaagatgagggctagggttgtcgcaaagattaagctgtcaaaccggtctaaaataccaccgtggcctggcaggatcgttcccgtatctttgacattaaattcccgcttcatccccgattcaatcaagtcaccaaattggctagcaatggcaataataatagcaatgaagccaccgaccactggtgtcatgggtaggaagggaaataaggatacgataataaagatcaagaagccagatgccaaaacgcctcctaaggacccttcaattgttttattgggcgagaggacgggagctagcttgtgtttgccaaagaaactcccaatcaggtaagcgccagtgtccgagatgaccgttgctaggacaatcaagattaaaaggaagccgtcttgctcccgaatataatacatagaataaaagccgtaaccaatataaataatccctaaaacagcaatgccggcatcgataaaggtaaaggactggtggactgtcgccgatatcaacattaatagggtcatcaaggcgatcatatggtggacctcaaggtaggtcggaagtttggggcctagccggtccgaaaaaacaataaaagcgatcgataagtgggctaaaagagaaggcaggctaaagaaggggatgtcaatcatccgcaagatttcaaacaaaccacggcaggccaaaaataggatggccagttgaaggggccaggacccgtagacaaatatgggaattaagattacaaccagtataatggctgtttcgattctttgaaacaatttcatcatccttttgaacctggttagaggcctccaaaccgcctgttgcgaccttggtattcctctagtatctcatcaaatgcttcttcattaaagtcaggccaataaagcggagaaaagtaaaattcactataggcattttgccaaaggagaaagttacttaaccgctcttccccactagtccggatcatgaggtcgacatccgcatactggcctaaaggatttgtatacaagtagctagcaatcagcttgtcatcaacttgcttgggctctaacttgtggtctaaaatgtcctggccaatcaatcggaccgcccgggtaatctcttcccggctaccgtagttaaaagccaggttcaagaccatgccatcattgtccttggtttggtcgattaccttttgaaccgttttgatggtccgaccaggaacgccttcttccgtcccagaggtcatgactttgatgttattttccatcaattctggcataaacttgtcaaaaaaagcgataggcaagttcattaagtatttaatttcctggggaggtcgcttccagttctccgtggaaaaagcatacaaggttaacaccttgactccccacttgttggcagccttggttacccttttgactgcctccaagccttcccggtggccttcagtccggaccaaacctctttgcttggcccacctcccattgccgtccatgataaccgctacatggttgggaatgacttgtagggctttcgcttccttatcagttttcataacttggttttcctccaataaaaaacattataccatgtcctattatatgaaaaatgactaaagagtgccacgctaattcttaaatttatcctgaataaaggaaagttagcccgatttgctcaataaagacaaaaagcaagccagctagcaagcacactagctggcttaagcattcgctttattcagttatagccttattcatcggctgggataacggctccctcccaagtgtcattgataaagtctttggtttcttgggagtggagggcatcgagtaatttttcgatattttcgtccccttcgtcttctgcacgaatggcgatgacgttaacataaggggagtcagtgctttccaattcaatggcttcctctaagatgtcaatccctgagtcaacggcaaagttagcgttgatgaaaacaacgtcaccttcattgttttcatatagggtaggcatcaagcctgggtcgtattcatagtcgaagttaaagtcatgtgggttgtccacaatatcatcaaaggttgcttcggtgatgtccacattgtcgtcaacttcaattaaaccttggtcttcaaacattttgaggatacggccgtagtctgccaagttgttggagactaggatgtctgccccatctggcaagtcagctaagctgtcatagtcatgggagtaagccccaattggctcaacgtggacgcctcctgcactaactaagtcgtagccattttcttcaatagagttttctaggaatggaatgtgttggtaatagttggcatccaagtcccctccgtccaaggcttcgttcgggaggacataatcgtcataggtgacgatttcaagctcaatgccctcttcttctaattggggttggacaaattccaagatttcaccgtggggggtgttggaagcaccaactgtcagagtgactggttcgccttcttcatcgtcgtcttcaccactgtcagcagcttcttgttcagcagcttcttcaccgttgtcgttttcttcttggttggtaacttcttcgttttcagcttcttggttagcgtcttcttcgccaccattaccacaagcagctaaaagtagggttgacgcggctaaacttgctaatagatttgcttttttcattataattcctcctattgttcaattaacgtttatctaataatttaactgtcaggtcaccaagaccttgaatgataaaaactaaaactaaaataactaaggttgccactaaagtaacagctgggttggaccgctggaaaccttgcaagtaggccaggttccctaaaccaccagcaccgatgactcccgccatagcggtaaagcctaaaacagcaatactagtggtggtcaagccagcaatgagagcaggtgatgattctgggatcaaaaccttgtaaataatttggaactcattagctccaatggcattggctgcctctaagacccccttgtctacatccctaaaactggtttccaccaagcgggcatagaagggagcactggagagtatcaaggctggtaaggctgcattgggtcccgtcatggtccctaaaagcgaccgagtgaagggaataagtaagacaattaagataataaagggaatagccctaaaaatattaacgataacggcaacgatgtagtagaaaacctggaagaatttaccttctttgttttgagtctcaaagaggagcaggcccaataagagtccaaagacaaagactgcgatcatggacaagagggtcatgtagatggtctctaccgttgcttgctggacatttggccagttgacattttcaaaagcaacaaattctgacaggtccacacttgctaaaaaaagattaggcacggtagatcacctccacttttgctgactggctaataaattcttcggccgcctcgatagcctcatcatctcctaaggcttggacaaagagggtacctgaaggcgaagccttagttgaatagatcgatcccgagataatattgatatcaatatcaaacttgcgactggcctgggaaattaaaggagcctggaccttgtctctatcatagtgaatactgaagacatggccttggggctggcttgcaataaagtctttcaaggctttttctgtgtcgtcatcttcactttgtaaaataaagcgtttggtaatgtttttttgcggattcttaaagatttcgtcagcatctccagcctccacaacagcacccgcatccatgacggcgacccggtcacaaattttccggattacttccatttcgtgggtaatgatcacgatggttaaactaaacttcttgttgatttcaagtagtaagtttaaaacatcgtcagttgtcttagggtccaaggcagaagtggactcgtcacaaagcaaaacatctgggtcattggccaaggcccgggcgatccctaccctttgtttttgcccaccggacaattgggctgaataagtatcttccttaccttctaaaccaaccaacttgattaattcgtctgctcgcttgatccgctcttccttgccaacgcccgcaatctctaagggaaacatgatgttttccctgactgtacgggaccaaagaatattgaagtgctggaaaatcatgccgatcttttgtctcgccttccgcaagtctttgttagacatttgggacaagttttggccattaatggaaatttggcctccagaagctttctctaggccgttgatggtccggactaaggttgacttgccggcaccagaataaccaataatcccaaagatctcccctgtcttaatggacaaggaaacattgtcaacagccttgacttcagacttgttctgcttaaaaatcttagaaacttctgtcagttcgatcaatcggtcttcactcctcctactaaattcccctaggtcaagtaagctagggtctttaccattgaaataagtagcaataaaaaaagctccgccccagtctctttatagactgaaagggcgaagctagttcacggtaccaccttttttcgttgactaaagccaacactcatcgagttctatcaaactctgccactgtaacgggtggtcccgaataactctcacacttgcttgaattattcatgctcagtgaccatattcactcacttagctttacctacttccaccacacgtaggctctcttagaaaacgccatgagctacttatcacttcattgccttatttaatgattaaagttatactatcatagttatcatagactgtcaaacagtttttttgcaaaataacagaaatctttcgccttggattggggctagttacctggtcagtccgtcattaaatcccgacaaagacctctactacttttcttattttttctaagacggtctcttttttccgctcccgagctcctttcctacgggaggttggaggaagaatattatcgagttcattcccaacatattccacatagccctagtcgatggacttatggataaaacgggtggaatcttctttcaatttctcctcttctattaaactcttgatcttatcatccttttcctagcgagcaaagttgaaaattcagtaatgttttctgaaataaaccggtaaaataaaatacctaatatgtactgcttaaaatcccagccgtctactgcccctcgaacgtcatcagcaatagcccaaattcgccggtgtagctccgctctttgggtcgcttgaccattcaccttacttacatctgccactttatttacctcactttgtttaaacactaatatggacgggagcaaatcaactcccctttaaaaatgatttaaatcaatcatatcacaatcaataaggagattatagcccaagtccacttcccacttttctaacagtattcaaacatctacctctaataactatttacttttgtgctatgctataataagcttagtaaagatgttaggaggacgcactttgaaaaaacgaatcaaaaaatatattctgaccttaattgttagcttccttgtcactaaaattgtgtcgtacttgatgaatgaagaattataatagaaaggaaccctcaagctagcttagcttgggggtcttttgtattagttatcgagaatttctttttctttttgacgagacaattggtcggcctggtcggtatacttgtcggtcagtttttggacctggtcttcgtaacgttttttttcgtcttcagagatttcactgtttttttctgatttttttaagctgtccatgccttcccggcgaatatttcggatggaaactttggctttttcttcttcctcgccaacttttttggcaatttctttccgccgttcttctgttaaggctggtacaaccaagcggatcacttccccatcactagcaggtgggatgccaatatcagacttttgaatggctgtttcaatatccttgagggtcgatttgtcataaggtgagatcaataaaacccgggcttcaggaactgaaatttgagccaattggtttaagggagttggcgccccataatagttgacctgtacccgttccactaagctagcattggcacgtcctgcccggataccccccagttgatagtttagagagtcaatggctttggtcattctgttttctaaatcttgcaacaattctttactcatttgtcttcccctttactgttgttccgattgcttcacctaggaccgcccgcttgatattgcctttttcattgagcttaaagaccaataagggaatatcattgtccatgcttaaggttgaagctgtggtgtccataaccccaagggactggttgataatatcaagataggtgagcttgtcatatttgaccgctgcatcatctttcattggatcagccgaataaaccccatctacattgttcttggccatcataatgacatcagccttgatctcagcagcccttaaagcagcagtggtgtcggttgagaagtaagggttgccggtaccacctgcaaagataaccacccgacccttttccaagtggcggatcgctcgtcgtctgatgtattgctcggccacctctttcatctcgatggaggtttggacccgggtgggaacgccggcattctccaggctgtcttggagggctagaccattcataatggtagcaatcatgcccatatagtcagcttgggcccgctccatgcccatttctgacccggtttggccccgccagatattgccaccaccgacaacaatagcaatttcaattcccagttcatagacgtctttaatttcctggcaaatcttttggatggtgagcgggttgatgccaaaatccttgtccccagccagggcttcaccacttagctttaggacaatccgcttgtagattggttcactcatgtatacttctcctaacaaaagaattaatctggattaatggtaacatatttcagcccaacctgcatcaaaatctcagccagccttgcaaaaaaccaccaaattcaagcgaatttggtggttagctttcagctggtcaattttaattgttaatttgtgattggacttcagctgcaaagtcttcttcttttttctcaataccttccccaacttcataacggaagaaggtttggatgccagagtcatgactatccaagtagtctttgacagtttcgtctgggtctttcacataatcttgttcagtcaaggaaatttcagacaaccatttgttgaggcgaccttccaccattttttcaacgatgtggtcaggtttgccttcatttttagcttgttcagtcaagattttttgttcttcatcccgtctgtctttaggcacatcttcactggtaacataaagcgggttaatagcggccacgtgcatggcaacgttacgagccacttcaacatctgatccgtcaatcagggttaagacggaaatacggccacccatgtgttcatagtcaccgaagacttggtcatcatttttctctacaacttcaaaccgtctaaaggtgattttttcaccaatagtagttgtagcttcagtgatggtgtcttcaatggtttgacctttgatgtccaattgcatggcttcttccatgttagctggtttgttttccaaaaccgcattggtaatgtcttcaaccagttgcaagaatttgtcgtttttagaaacaaagtctgtctcagagtttacttcgaccaagacagctgtattgccgttcactttagtcttggttaagccttccgcagcaattcggtttgcttttttagctgccttagctacacctttttcgcgcaggtattcaacggccttgtctaggtcgccgtctgtttcgaccagtgcatttttggcatccatcattccgacgccgactttgtctcgtaattctttcacttgagctgctttaatattagccaatgtttttgccccctaaattattttactgaaataaagtgttcaaaattcgcttaacggttaattattcttcgttgtcaccttcaacggcttcaaccatttcttccaagctttctgaactagcgatttcttcttctacttcttcctcgccttgcttaccttcaacgaaggcatcagccatggttttagtaatcaatttaacggcacggatagcatcatcatttgatggaataatgacatcgatttcatctgggtcacagttggtgtctaccatagccacaattggaatgttcaatttgcgtgcttctttaaccgcaatatcctctttgcgagggtcaacaacaaaaatggcatctggcaagccaggcatgtctttaataccgcctaggttgtattgcaatttttcgcgttctttaattaagataccaacttcttttttaggaaggacttcgaaagtaccatcttcttccatttcttcaagctctttcaagcggtcaatccgtttagagatggtgtcccagttggttaaggtcccaccgagccaacggttgttaacgtaaaaggcaccaacacgttcagcctcttctttgatggattcttgagcttgttttttggtaccaacaaataagacattaccaccatcagcagcgatgtctcggataaagttataagcatcatcaatcatgttaacggtttgttgtaagtcgataatgtagataccgttacgttcagtaaagatatatggtttcatcttagggttccaacgacgggtttggtggccaaagtggacaccagattcgagtaattgtttcatggtaacaactgacataaataaattcctccattttggtttttcttccaccaacttcgagtgaccagacactttacaagtaaagcaccctctggccaatccattggtgtgtttgattttggtctgattaactgtttataagtgtactatagattttcagcaatagcaagtttttccttgattagataggatttttacaccatactaatattaacaatttaaaggagtcacttttatgttatttagatttcttgtcaatttgatttatggattactgatcatcgtgaacggtcgcctagaagtcatcgggaaggagaacctaccggacaaggatacctatgtcctggttgcccctcaccggacttggttggaccctgtttttatcgccatcgctacccggccgcgggaatttgtcatcatggccaaggaagaacttttcaatgtccctatctttggttggatcatcaaaaaaatcggagccttcccggtcaaccgcgacaagccagggccttctgtcattaaaaccccggtcaaggccttgaaagaaagtgaccgggctcttatgatcttcccgactggtacaagacattccactgaactcaagggcggagccactaccatcgcgaagttgagcaagaagccagtcatcacagcggtctacgacggcccgcgcaccatcaaagacctgttaaaaagaaagaaaacccgggtcatcttcggccaaggatttgaggtccaaagaagagtggaaggagtctcggacctggaccaatactacatggacaaaatgcaggcatcctttgaccagttagaccaagaattaaaggaccgggcttcacactctgaaagctaaatgaagtcttaaaaaccgctggggcattcgccctagcggttttttggtcttatttatcttttttggacttggacttaatctgggtcatcatctgtctaatcttccgctcagatggtttttggcccatctgaagcatcatgagtcttaacatgtcttcatcaattggcggatttttttcgaaataatccatcatatacttccgggctaggaaaaagcccccaattaaccccccaattaaggctaagataattaagataatggctagtgctaaattcatgctttcatcccttctttgacttaatctaccctacttattgtaccaaaaagataaggaaataaaagaagagattgattgacctcaaatttgatcttccttacaagctcttataggctttgacaatttggtcaacagtaaagccgtaagaagcaaccacttctttacctggcccagctcgagccgaacttgtcgatagctaaactattgccttcaagaccggtgtagcggtcccaaccaaaggaagcccccatttcaatagcgaggcgtttggtcaccttgcttggtaggacggtttctttataagcttcactttgttcatcaaaaaggttaaaagatggcatagagactacagaaacatcaatcccctcttgtcttaacgcttcttgcgcttgtaaggttagggcaagttcagatccactggctagtaaaataccatctggcttgttgccttcttggctagaaataacgtagccaccgtgtttaacatgttcaaaccggtcttctttggtctggttcaaaccaggtagaccttgccgggtcaagacgatcatggttggtcggtccttggactcaatggcaatcttccaggcagcggccgtctcattgccgtcagctggacggatcacattcaggttaggcatggcccggaagctggccaattgctcgactggctcgtgggtcggcccgtcttcccccaccgctacggagtcgtgggttaagacataaatggccgggacatgggagagggccgccaagcggacagctggtctgagatagtctgaaaagacaaagaaagttgaaacaaaggaataagttccgccgtggaggataataccatttaaggctgaagccatggcatgctctcgaaccccataccaaatgttacggcctgtgtaattgtcttttgcgaagtcttcgccctggtcgataacggttttgttagacccggacaagtcagctgacccgccccagaagttaggcaaggattgagcgatggcattgatgacttcattagacaaggcccgggttgctttatcgtctccagctgagtaagtcggcaaggcttgctcccaattgtcaggtaggtctctagccaaggctttatctaaggcttgggctttttcggggtattcttctttatatcgggcaaacaaatcatcccaggcctggtttttagcctggccctctttgataatggtctcatcaaaccggtcttttacttcttcaggaatataaaagttctcttggtaaggccaagcataggattcaactgctttttgccggccttccttgccaatcggagaaccgtgaacggcagctttcccttggtccggagctccttgaccaattacggtcttgatttcaatcaaggatggcttgtccacctgcttggctttgtcaatggccgcatggatctggttaaggtcggtcccatcttccacaaagatatagtcccaaccctgggcctcaaaccggcctttgatgtcttcggaaaaggccttgctgaccggtccatccaattggacatcgttggagtcatagaggacaacgagtttatttaagtttaaatgtcctgccaaactgcctgcttcataggaaattccttcttgcaagtctccatctccaaccaggcagtaggtgtagtggtcgataataggatagcctggttcattgtaaagctctcttaagtgagcttcggccatggccatgccaacagcattagcaaatccttgacccaaaggcccggtagtagtttccacacctggcgtctggttgacttcggggtggccaggggttttactcccaagctggcgaaaattcttcaagtcttctaggctgacgtcaaaacctgacaaatgaagcaaggagtaaagcatagctgacccgtgtccagccgacaagacaaaacggtcgcggttaatccagttagggttgtctgggttaagtgacaggtgcttggaccacaaggtataagccatgggagcagctcccatgggcagaccggggtggccggaattggcttcttcaacttggtctacactcaacaaacggatggtgtcaactgctaattggtcagttcgatcaaacatgtgttaactcccttctgttaacggttatgaagtcctctatctttttggatttttttaattttatcaggtgtcacatccttgccttccgggtcgatgatttttgtgttttccaaagttcctctgaagttggcccgaaaagctttgatatattcttgtcttagagaagcttgttcttctttttcttctgggcttagcccttcctcggttctttccttacgagctaatacattaatccggtcaagtttgtcttgagataacacgctaagtcctccttattaaactgatactggttcattataacatttataaaaggttttgggtagaagcctgcttatttcctactaggataaccgaacttatgtttgattccttcatataatatggtatactaataatgactatagacgagaaaggaagtgccagcatggctaaacgtgggcgcaaaggagaaaaacaattggaaatcctcagctatatctaccaagaagtcagtgaaaaaggctacccaccgactgtccgagaaatcggcaatgccacccagctgtcttctacctctactgtccacggccacttggctaacctagccaaggcaggtttcatcacccgcgactcttccaagccccgggccatggaggtcaccccactcggtctcaataaactaggcatcgatgaagggcaagatgacaagcacatccctttattgggtgtggttacagcaggtgagccaattttagcctatgaagaggccaatgacttcttccccctacctaatgacctagagttagagcggggcaacttgtttatgctgactatatcaggggatagtatggtcaatgcagggatttttgacggcgaccaggtcattgtccgccagcaagcagatgcctctaacggggatatcgttatcgccatgactgaggaaaatgaagctacctgcaaacgtttctacaaggaaaaagaccatatccgccttcaacctgaaaatgaccggctcgaccctatcattttaaaccaagtatccatcctgggtaaggtcatctctctataccgtagccaggtcttttagtggacaaggtgaaatcttttaacctataatggtagatagcttactaaaagatagtgatacatgactgaaagaaggagatttttatgtcagttagtccccaagaatttttgcaattagctgaaagttttaatgaagttaccccagaaaaagctgaagaactcttagaagcaggccaaagcaacatcgtctttgtgggtcgggaaacctgccccttctgttgccaatttattcctcgtctacaccaagttgctcaagaccaagacttgaccatcaatttcctccactcccaacatcctgactacttggaagctatctcagattttagggaaaaatacgaggttccaactgtccctgccctcctctactctgatgattcaacagatggtgtcaaatcaattagcgacagtagcatgagtgaagccgatattaaaagctttattaacttgtaagaatctatacaaaaagaaccggttagccagacagtctagctaaccggttcttttttattttttggtatatttttgcacttcagggataatcttctcccctaagtagtcaatggtttccttgatatcatctaaggagaccccagcgaagtctacttgggcgacatagcggtcatggtggaagtgctcatattggttgaggattttctccacaacagaagcaggagacccaatgtttaaaacatggtcgacgcttgcgacatccttaacttctaattcatctagataagacgtccgcgtttgtgccataccctctttaatcttaggcaggtatttgtgaatggcttggtctctttggtctttgaccatcatgaaactggccgttgcgatcggcaactttccatggccataagccttggcttcttcctggtaagactggaacaagtcttggtagtaatcaacctggccactaacttgcattaggtggagaggaacccctctccgggctgcctgaagggctgattggagactaccagaattagcttgccaaatgggcaggcccttttcaggacggtctggtcggggccataccaaggattgcccttcctcctttttatctacctggcttggaaaggcttgggtgttgatggtaagtaggcggtcaaatttttcctcaaacaactcttcgtattggtctaagtcatagtcttgtgtcttaaaatttccaacccgggccgaccgtccgcagactaactccatccgctctcgggacaggaggtcaatggtagccgcttgctcaaaaacttggacggggtctcctgtactaatagtagtggccccggaagccagtttgattttgtcggtttggctggcaatggctgccaagaggatgaggtgggcggaagagacaaagtcttcctggtgtgactcgcccacttggaaaatagccaaacctgcttggtcagccatctttcctaaatcaaggatctggtcgatccggtctttaacggacaagtggctgagtccggcttggaacaagtggtcgccaatggtgtataagccgatttctaatcctttttttgcatcaaatttaggcataatttgctttttcacattaccaccccatgccctttgttcttgtctgttaatcgtattgggttaagcttaagaggtcatagtctttgatcttgtctctgccttttaaacctaagagttcaatcaaaaaggcagtgccgacaacctgacctcctaagtcttcaaccaagtcaatggtggctgcgatggtcccgccagtggctaacaagtcgtcacaaaccaaaactttttggccgggttggatggcatccttgtgaatttgtaggacactatccccgtattctaggccgtaagatttttccatggtttctcggggtaacttgccctttttgcgggctggtataaagccaatccccaattcataggctaccggacaaccgacaataaaacctctggcttctggacctacgatcacttcgacttccttatcctgagcaaagtcgacaatatcttggatagcctcttggaagactgggccattagccatcagtggagaaatgtctctgaaaatgatccccttttcaggaaagtctggaacattggcaatataatctttatagttcatttatttaccccttattctttatttaactctgcatcaaagtaagaccgcacttggtcttttgggctaaagagtaaggcttcttccgcctccatagccgcttgcatggactggtaagtagacgttgcttcaaggtcaatcttttgatgactaccttcaaagagtaagcgtccactttctattttaacaaagtttacttccaaaaacacctgaatgacaagattaaaagtgacagaagtcatctgaagatagtttggcaagcgggactgagcctgggcaaggggaagacttttgtggccaattaagtacttgtaaacccggttgaattcttctggctggggtaggccgttaaaatagaggctggatggtttgaaaaagtaaagaacaacctgcttatcgcttatctggggcaagagttccttaaactggcccaatgactgaggacagtctaccaagtagacctcttccagcaaggattgacctgcctccgcttcttgagctgttaaaagctgggcctggcttggaagataaggcttgacctggctggcaatagcctggttaaagcagatataagaagccttagtccgggtaaaaagagattttttcagctggttggttcttttgtcaatgattcttgcagacaagagccgaatatcttgaatcatcagctgggccttggcttggttctgccagacatttttatccaggttagccacaagctggcattgggcttttgaatcaaggaaatctgccaaatgccctagggaaaagccaatcccttctagcttccgatcttgatcgtctagtattaatttcaggtggctcttatcctggccgattcgtctaacctctttaatcggcggattcttaagaataaattgaggttttggattgtcttggccaaaaggtttgagcaagttaagttcgcgaatggtggccaaggtgacctggtcaggacttatttcaccatcaatggccaggctaggcctgatgtctatttcttctttcagctgggctagcctttggttgaggaagtcccttaattcatctaaacgattggtctctaaggtcattccagcagccatttggtggccaccaaaactgacaaataactctctcacttcactacaagcagcaaagaggtcaaaattttccactgaccgggctgatcctttgacaatgccttggttcttaaattccttaaggactatagcaggcttgccggtttcattaacgatccgactggccataataccaaggacaccctggtgccagtggtcagccttgacgatgtgaatatgatcgtttgggtttaaggaggtcaaggcttctgctacactttccttgaccaaggtcttacggtcttcattgacctggataaagtgctgggacaggctagcaaccctttcttcttcaaagctagtcaagagttcaacaacctggttggcatcctccaaacgaccgactgcgttcagaacaggggcaagtttaaaggaaattgtctcttcgtcaatttccgagaaaggaatagctaagtctgtgatcaaccgtctcaagcccaatcgttgactctcttttaattggtccaggccaaactggaccaaagttcggttttctccggtcaaagagaccatgtctgctacggtcccaattgctgctaggtccaacatttcttgagggacttcccccaatagatattggcttaattttaaggccacgccagccccagctaagtcttggaaaggatagtctccttgggggtgggctggatggaccactgccaaggcatccggtagctggtctggcaggccgtggtggtcactgatgatgacgtcaattccctgactcatggccaagtccaccgcctcatggccagccactccattgtcaacggttataatcaggtcaattccctggtcaataaattcctggtagcgatcagcattaggcccatagccgtcattaaagcggtcgggtatatagtaggtcaccagccctcccaaggtcaggaggcattcgtataaaatagctgttgacgtcactccatcggcatcatagtccccgtaaatcaggatcttttcgccagcttctactgctttgaaaatccgattccctgccttgtcaatctcatacaaggagcttgggtcgtgaaattgacttggatctttggcgataaaggattggatagcttctactgtatctaggcccctagacagacaaagctctaagaaaagatcggaataaggcaagtctccccctaggtctttgactaagtccttgtctacttctgtatttaacttccaatttaattggctcaatctggatccacctttagtttatttcttgaaaaatgtatggataaatgcctctgacaggctaggaaaaaggttatgtagcttaacacctaggctcataataatgggaaggttgacctgacgtttgggcttcatatagatcttgactattcgtttggccacctggtctggatccaaggtgagggacgaaagctttgccaggtaagatgaagagacgccagctttttcaaaaaagtctgtatcaaccggccctaggttgactgaagtcacataaaccccatagtctttcaattctaagcgtagggcatcggacagggaaatgacggcagcctttgtagctgaataaatactagtcgaagctgtcggaacttttcccgccaaagacccaatatttacaatgtggcccgaccccttgagtagcatatggctagctaggcgtttagacaagtaagctaaggctaggatattgacctggaatagcttgactatttccttataagaagtctccaataagggcttggctaggccaatacccgcacaattgaccaggatatcaatttgctctttagccaagagatcgcttaagacttggtccgtttttttcatatcggctaagtccagttggtaaatagaggccgaacctggagacacttggtcacaggcaacctggacagccttgagataatcccaccgtcttgcgacaaggtggactcggtagccttgccggacactctccaaggcacaagactggccaatgcctgaagaagcacctgtgattaaaacattttttgccataaacttgtcctccctaattaaaaagggtaaacaattgttcaccccaagtggcttcatcgataatagttaacccttagccggtatagaaaatgaagaaaagtcatgcatgatatgggtctgggcaaagatttcttgggcctgtcttaagtattcttccaggtctgaagctaggtaacgggccgaaatatggttgaggagtaagtcctggacctgggcctctttggctagcctggctgcttctacactggttgaatggttgtaagccttagccaagtctttttcttggtgactgaaagttccttcgtggaccaaaacgtccgcatcctgggccaggtctaggctattagtacaaggtcttgtgtctccaataatggtaattttgcgtccaggaatgtcagggccaatataatccttaccgtcaatggtccggccgtcctctaaggtcacctgtttgccggcctttaactggccgtaaaggggaccaaatggaactccggcttcctttagggcctggctgtccaaggacccctttttatccctttcaacaatccgaaagccaaaagaatcaatcccatgtttgaccttcttgaccgttatttggaagtggtcgtcggataagacccggtccccgtcacagaattcgacataattgatgggaaatttgaggtgggtcttagagacagttaaggccgtttgaacaaaggactgaataccaggaggaccatacaaggtcagaggtgaagcaccaccttggaaggcccgggagcttagaaagccgggcaagccaaaaatgtggtcgccatgaaggtgggtgataaaaacttttgaaatttttcgtggtttgatattcgtccgcaaaatttggtgctgggtagcttcaccacagtcaaaaagccaaatttcatttaattcatttaagagttttaaggccaggctggaaacattccggtgctttgaggggacgccagacccagttcctaaaaattgtatttccataaaacttcctatctaatccatgaactcaaagacaaaatcttcaacttggacgaggtcaccagactgagcccccttgtctcttaaggcttggtctactcccatccctcttagctggcgagaaaaccgcataatggcttcctcgtggtcaaaattggtcatggcatacaaacgctcaaccttgggaccagaaaccaaccataccccttcagggtcgcggtcaaggtcaaatttgtcttggtcagcttgaaacttgtagaccactctttggtcggcttcactagtttcttcctggtctaaacttggggcttggtccagttggtcgactaagtcggctagtcggatgactaggtcctgaatgccagcctgggtggcagctgacacttcaaagatttcatagtcaaggtcccggctgtctaactcggctttaaattcgattaaattatcccgggactggggcaggtccattttattggccacaatgacctgcttgcggtccaataatttctcattatagtcttttagttcttggttaatctggtcaaaatcatcaattggatggcgaccttccattccgctcatatcaagtacatgaaggaggatgcgggttctttcaatatgcttgaggaagtcaatccccaaaccaaccccttctgaagccccttcaattaagccaggaatatccgccaagacaaattccttgccgtccactgcattcactacacctaaattaggggcaagtgtagtaaagtgataggctccaattttgggtttagcgcctgagacaaccgacaaaagggtcgatttcccgacagaaggataacccactaggccaacatcggccatgacttttaattccaattcgacatcccgctcttggcccggctcgccgttttcggcaatggagggtgctgggttcttatgcgtagcaaaacgtttattgccccgacctccccggccaccttgggctgccaagacttcttgtccttcttcttgtaagtcagcaagtatagccttactttgggcatcccggataatggttccaggcgggacactgataatcaagtcctctgccttcttaccattcatccccttgggcataccattttggccactatctgccttaaaatgggggttgtagcggaagtctaccagggtacggaggccttcatctaccttgaagataatgttaccgccactgccaccgtcgccgcctgctggtccaccattgggctcatacttttctcgtctaaaagccaccattccgtcaccgcccttaccggctctcaggttaactttggtgtagtcgacaaacatagacatattgagtcctcctttcttttaagttcccagtaattgttggtaggttctttctgctgccaatcggatggccttttgcatttcctcacttaaatagtggtctttggaaatgatgggcagggtcaatttatattcaataaatggtgtgttttcttctgcgtaaaaagatgcataaaccacagcttttggggttaggcggacctgtctaattttttctaacaaggcctgacgcatgtcggaaaaaccaaccaataagttcacgaaaatgtccgctgccccatactggtagttcatttcgtccaacttaatgacttttaaatgaaaatgggggtccaattcaaaaaggcctggatttaaatcagccaggtaggcttgcatctggtcaaattcaaagtcattagcagccgccagggtaatcgactttattccgtattttttcaagcggtaagaaatgtacaagctctcaatattagcccccaagataaccaagtcactctctttggcattgatatactggcaagacttcatgataaataaaagctggctgacgatattataagaactcaaggcttcttcagagtcttcaaacataaaattatagagactacggaagagctttttaaagtggggtcccaaatgaaataaacgtctggtcgataaactagactcgatcatgtcctggaagtaatggctaggcaagagcaagctaaagtcataactcttcttaaacaaatgattaatggcctcttcgttatatagggaataggagaagttgatgaggtcatttaagtccagctggctctcttgggacagatagcgaagcaagtccccatggctaaagctggtttcattaataaagaggtaaatctcaaattcttgactaatattgagcaggtagacttctaagacaccttggaaagacttgatttgtttgaccagtccttcttggttttgaaagctggttaagaaaaagctttgggcatccgagtctaacagtgttgtatcgatgccatacattaaaagtttcatagttggtcatcccttaaaaattcccgaataatttgccaagcctggtccctgccttccttgctttcggccgaatagaccataaactggtcaccatcataaaggttcaaggcttgggtgatatcttgtatttgcttgtctcgtttggaaggcttgaccttatcagccttggtcgctatcaccaaaacaggcaggttaaaatgactcaggtattcgtacatttggatgtctagttggctaggcttatgccgaaagtcaactaactggatgaccaagaccaaactttcccggctggcaaagtactcttccatcatagctgcccagcggttttgctcagccttggataccttagcaaagccatatcccggcacatccaccagcaagagctcattttcaacctggtagaagttaagagtccgagtctttcccggcttgctggaagtatgggccagttttttccggttgaccatactattgataaaagatgacttgccaacattggaccgaccagccaaagccacttctgggaggccttggtctgggtattggtcttggctgaccgctgagattaagatgtctgctttttggatatgatttggatccataaattacctcattgcaagaatctatttttcaaaacttactggcttgattacttcaatattataccacagctttttataagaacctaaaagaaataaagactcctcagtcaaggagtctttatggctattgtgtgatgtctagtcaatgtctaattatcactagaaacaagcttgccatctgcatccaggtaatcgggcttggtttcacccaaggcagctgcttccgtaaccacgacctttttaacttggtccaggcttggaacgtcatacatgacatctaacatgatggcttcaattatagaccgtaatccccgagccccggtatctctttcgattgccttcttgccaatgactctgagagaagcttcatcaaactcaaggtcaacttggtccatttcgaggagtttttcgtattgtttgaccaatgaattttttggtttggtaaggatttgaaccaggtcatcctcatccaatttatctaagacggctgtgatgggtaagcgaccaataaattctggaatcaaaccatacttcagcaagtcttcgggtataatctcttgcataatggactggctatcatcaatttctttcttgcggttggaggttccaaaaccgattaatttctcacctaagcgttctttgacaatagactcaattccgtcaaaggctcctccaacgataaagaggatattagtggtatcaatttcgatcatttcctgttgaggatgcttccgcccaccttgagggggaacagaagctgtagtcccttctaaaatttttaaaagagcttgttgaaccccttccccactgacgtccctagtaatagagacattttcggattttcgggcaattttatcgatttcatcaacataaataatgccgtgttgggcccggtccacgtcatagtctgccgattgcaagagttttaataagatgttttccacatcatcccccacatagcctgcctctgtcaagttagtggcatcagcaatggcaaaagggacatttaagatccttgccaaggtctgggcaaggtaggtcttccctgaccccgttggcccgatcaaacaaatattacttttttgtaattcaacatcttcttcatctcttgtttcctgcaagtaattgacgcgtttatagtggttataaactgcaaccgagagggctcttttggcgttgtcttggccgatgatgtattcatttaggatatcgcgaatttcagctggtgtcggcaattcgtcaatggtataggaatcttcttctgcttgcagctcttcttccattatttcttggcacaagtctacacactcattacagataaaaacaccaggtccggctactattcgtttaacttcatcttgagacttaccacaaaaggagcaagaaatatcttccgtctgcttgttttggtcaaccattgatccacctcatttcatggtttaattaattcttctttaatgatgttcaatgtgtcaaaagaggaatgcccggcatccctctttttttccttatccaagttaggtcttcgatgcggtactattcggcctcttccgcttctttgtctgcttcagactcttggcttgcagtggcttcttctgtttctttagcagtcgaggtaatcaagtcaatagcttttttcaaggaaatgtcgttttgcaacaagtcaggagacaagacatcccggacacgagactcttccatgttgtattgttcggctaagtccgcaatttcttcgtccatttcctcttcattgacttcaatgttttcagcttcgacaatggcttgcaaaacgagattggttctgacattaaattcagccccatcttcaaattgctcgcgcaagtcatcctcactggttccggtcatgctgaagtacatttcaggggaaatcccttgttgttgcatattacccaagtacatttccatttgtcggttcacttcttcatccgccatagcttgagggatttctggaatgtcagcattttcaacagctttacggatagcttcatcgtcacgagcctcttcagccgcttgagctctgccctcttctaattcttggcggattttttgccgtaattcatctatagattcgacatcttcgtcttcatctttggcaaattcatcgtcgagttctggcaattctttagacttaacctcgtgaacggtcacttcaaagaccgcttcttgaccagccaagtcttctgcttggtagtcttcagggaaggttacttcaacttttacttcttcttctggagaaacaccaattaattggtcttcaaaaccaggaatgaattggcctgagccgagttcaagagagaagttgtctgcttggcccccttcaaattcctcgccatctttaaagcctttgaagtcaatgacgacagtgtcgccttcttcagctttgccatctttaatggttaattcagctgctcgttcttgtcgacgtttcaagctttcttccacttcttcatccgaaacgtcacgctcttgtttagcaacttctaagcccttgtattgacccaattcaacttcaggtttaagggtcacttcagccaccaattcccagtcttgacctttttccattgattcagcatcaatttgtggctggccaactggttcgattccttcttcatttaaagcttgctggtaggcaaagggtaaaatgtcatttaaggtatcttcatatagggcttcttccccatatattttatcgaacatttttcgaggtaacttccctttacgaaaacctggaacgtttaaattcccttttactttcttaaaagtacggtctaggccactcttaacggtatccttgtcaatggtgaaagataatttaccagttgttggaccaatcttttcaaacttcgtagtcatctattgagaccctccaaatttatctatttcaatttcattcacttatattatcttatcgtttataagcataccttgttattatacaatacgcaaattccaatgtaaatgcttagctgtcagaaagcttgagcctttgaacctggctaaaaagccggccttgatctgacttctctcccccacttgcttcaaggtcaaaatagccttgataggacaagacccaagacactggatccgtgatcagcttccggtgcaagggatagaggataaggtagtcaagccaaacttcatttttaaccagggcaacttttgtggggtcggcctgaaacaagtcttcagccaggccctccaactgcctgccaaattcgtcttctttgatcccagcaagctggctcaaatcaacttggtaggtctcctttaaaaaggggtagctgatggtttggtcaaagtccttgaccaagagtccttggattaaagctgttttggtaatggggtggacatatctgttgggcaaggcaatttgacaggcttgaaagtaatcgtctcgatcaaaagcataataagccgaggcaatgtcaatttgctgacttgggggaaactgtcccaggctaaaaagatcttggttaagctttttaagatgaccctgatagcgagccataaagtctttgagatccaagtttaagtctgcttcaatttggtcataggaataatcaaccaactgcccgtccactagggcgataaagtcttcatatcggttttcttcagccagccctctcagataaagggccagtccttcctggttgtcctgacccaactgataggctttgacatagtcatctagatagtcttctaaaacaaaaagggcctggtcagggtcttccaagtcaaaggacagcctagccatggtcaagtttaaggacaggttgggattgaccttataggcctggctatagacttggtaggcttcttttaacttcccactattttcagcctgcttgccagcctggactagccgagtataatcatctggaaagggaattatgtcagccatctctagccactccttaaaaaagctactagggcaagatccctagtagcttatcgcttatcgtcttctcttgggttatgcctcttggtctgcgtcttcatcttcactgacttggtatttaaaaccttcaatatctttaaagttaacgaccgttttttcttccattaagtccaacatgctttttgaggaattacgccaattgatcttgacgatagcactgttggttaagagtttttcgatttccccttccatgggttcgtctcggaaagaaaagataattttgtcccccacatcaggacggaggttttctttaatagtatcaataattttaacagcttccttatagtcgagctcaagcaagttagcgatccgggaattggatgcacccttccgtaattcagtttcgacaagattttgaatttcatcggtaattttcatgtcagccatatagattctcctcaccaaatgaactgtaacaggtaaatgatagcataagtgaggtgatttttccagtttctagcttaagaaggcttgttatccattcacttctttcatttttactagttcggactctggtcaacccttctttttcaatctaagcctaaggtcgggtcaaaccttgcttaaccttcttgtctttacccactaggaaaaagtcagttccatctagtctcgctataagcttgtctaggtcaaggtctgcttgggcttggagacataagctagcaaggaagtggtttccctgaaggccagggctgtccttgtaattggctaggatcaggtaggccacttggtcaccactcttgtgttgtctaatccgagagaagttttccgtatccctaaagttggtattcgtctccatgctagcaagcggtgtgacttggttggaacttaagggaaggcggccgtttacggcatggacgccttttaagtctttcccttttagggaaagggtaaaggtctcaccagacgaaacttgatccttgtcgctggataatcggagtttacctgctaggtcttgaatttgaccggagttttggccagatcctttattaatctgcccgctcgccaggtaaatatcgtaggcatcaatgtagccattgtggtttaagtcagctacttcaatgtagccttcaaagtcactgtcgccccgtcttaaaccagcataatttttaaaggaccggatgtcactgtcgtccaccctaccgtcgccagttacgtctccagctagtaaggctttcgtatgtgggacttgaaaaacatagaggccactgccggcaataaattcattgtcacttgtttcaaggacctttaaggctaggaaattagcctggactgcctggtcaagttcgatgacttgtaatgccgaagtctcttctaagctaatcctatcttccaatgtgtgccagttgactccatcgatcgaataagccaggtcaaattggcgaattactcctcttaacccccccatgccttggtccttggtaggctaagcggtcaatagtgtaaacccggcccaagtctagttggatctgtcccggaaggtcctcttggtctaatggctctaaaaagtaagttccaggcttgccgtcaactaaaggtacaagtggctggttgaccttgcccttaaagtcacctttaatttcttgaacggatacagtccaagaaaagtcatcttcggccgttgtaagcgttttgggattggaccagtctgtcatgtggtccttaaaaacagctcgaactcggaagctataggaagtttcggcttgtaggtttgcttgggtaaaaatcggctcttgaatattcaggtggacctggtcgtctaccaacaagtcataacgtaaagccccagcttgatcttcccaagtcagggtaagggagttcgtcttgactccatcttctgccaaggctaggtcaggtccgattccgcttacttcatctacttggtctattgctggatagtcatagacaaagccatttacctgtagtttgaccttagaccggatggaaataggacctgttttaatccggaggaccgggtttttgatccatttttccccataaaagtccccgtcttggctggaataatggtttaggtttggacaagggtcatagtagaaagcaaaactagctttttcaaagtcctctagactagacacttcaagcaagtcttgctgtaccccatcaatgcttagttgaagtacatttggacgttcggtcacattcaggttaaattggttaactttcttttctacctggccctggaagcttccctggcaagggcctagttcaaccgtgacctggccttctttttcccagcaagttaggtctgttttagcaacttggcctgcttggtagtcagtggagtagccatcatcttcaattaagcaaaaactagtttgaccaaagggataaatttcaaaaattcggtaacttgggtcaaattctttcatattattacttggcttagccatggggataatagctcctgcccggacaaaaaggggcaatttccaaataggggcttcaaagttatgcaagaaatagcctccatcatacacttgaccggtaaagtagtcgatccacttctctccctcaggtaagtagatatggttgcggacatcgttgccttcctggtccatcttaacatcctcgtagaccggtgccactagaaagttatctccaaacataaattggtagttaacggcctggctataatttacttcctccttgggaaaatcaataaacatggcccgtacgatcgggtctccctcaagggcttggtgcatcaaagtgtaagcataggggattaactgagacttgagcttgagataggtccggtttaaatcagaagtcgtctggtcaaagacaaaggggccttttgggtttgctccccaaccgtccatgttgagttgcatcccggtaaaggtcttccactggtaatcccggatgttgataatgggattgcctccaccaaaaataccgtccatgtcagagcagatgttggggttaccggaaagtccagtaccaatgtaggtgggaatatgaaagcggatatactcccactccccaccgttttggtctcccgtccaaaacccagcattccgctgagaccctgcccagccgtccagactgattataaaacgccggctcccgcctgaggcccgctccatcatgtcccctgcttcctgggttccgtggaggccaaaagagtagccaggacctacccaggcaacatccgtcttcagcacacggacagaggcctggtttacctccttgaccaaatccctttgtaataaggcaggcagactctcatctggtgtcagttcagattccgtccacagacccgtcacaatccccttgccttccgtctctttggtaaattcttctaagtttctgatattcccttccaggctgtcttcttggccataacctgctccatagccgtcattgactaagatccaacccaggggcatgtcatggcgacggtagcggttaactaaggcagacgcggtaaaaggatagtttttatcttttggctgccccgacaagctttccttaattattccctcacccttgacttggttcaactggtctgggtggacttccctataccacttgtctacttcagcaaaataaatcccgtctggatggtctggggcaacttcaacccaaaagtcccggttgtaagcatttaagtgaccttcataaagggagtaagccggcagaacaattggagcccctgtcaggtcaaagtagccctttaaaatatcttgtggcttctctcccaagatataaaaagcatcaaagcggtcttccaggtggctagtgaccacctggtttgggtcactactagcaaaatcataataaccaggtttaaaggtatggcggaggacaccgtagccgtccgtagtccaataaaatggattaggggaggcaacgccaccgtcaacccagttattttcgttgacaatgtttatccgcttacccttatgtgaaaaacgtccattttggatccccccaccaaaataataagtatcttcattggcctttaatgtttgacttgttccttgtgggctcaagctaagggggtgaagctcttgaataattggtcggcttgcccccttttgatagactttcagggtcccctggttcttgtctaaagaagcggtataggctgaggtcagtacttgatagtcttgatcgctttcttttagtttgacttcaaaatcctctgtatcagtgaaatcctttatcaaaatatgggccggcttatctgcttgccaaggctctggccggtcggtaaaatcatgcccttctttttccacttgaagacgaaatatagtgggagtccaaacttgaattctgcctcggtaagcatttttatacttgatatcaattgttttgttctttattgaaagttcttggatacctgctaagtaagtgggaacgaaagacttcccttgctggttcaactctttgataagaccacctgctcctcttctgtcacttgtctggttggctacagtagctctaaaaaatcaaatgataaacttgcaatttaatctttacagctattatccctatcttaccattttttaacaagaaatcgtctattatttgcttaaaaatattctttaaataagggctaggcaaggaaagtaaggaagatgcaaaaggccccaaacttccaaagaagtttggggcctttaagcaattatcttgccttccaatataaaacgtacccgagaggattcgaacctccgaccgttcgcttagaaggcgagtgctctatccagctgagctacgggtacctatttgtaacgacaagatatatcttaccaatacaccaccagattgtcaagcagattatgagtttgctctgactagatattactgggaaaggtctaaaataattttaccaatatttttattatctgccatatattggtgggccacttcaacattttcaaaggggaaaacctggtcaatgattggttctaatcggcctgactgaaaacgatctaaggcatggctggtaaaagaagcaaccaagtctcttttataggctaaggaccgggaagatagaagggtaccttcaatttgcagccgcttgctttggatttcagccaagtccaagtctttaacctggctaccacttaaaaggccaatcaaaacaagcttgccgtcagtggctaaagtcgctatattctgatgccaatagtttgctccaacaaagtcaaggatcaagtccacgccttggtcttggctgtcagctgaaacaagcttggcaaagtcttcctccttgtaattgatagccaggtctgccccaagatcttggcagaattgaattttattggaagagccagctgtggcataaatccggctaggactaacttgacgagctaattggatggctgccgtccccacaccggaagccccagcatggattaaaactttctggtctgctttcaactggcctatggtaaagaggcattggtaggcagttaaaaagacttccggaatagctgccgcctgaacaaaggaaagatgttctggcaccggcatggccaattggtcatctaagacggcatagtccgcatagcctcctgtttgaccgaggcccatgacccggctccctacttttgtctgggcctggtctccagcctccaccactcgaccagctacttctacccccaagacttggtcggccttagacttgcggtggattaagtcgagtcggttgaccccacaagcctgaacctccactaaaatttggtctgcttggatagccggttggtctatatcgaccagactgatatcatccgtatccttggccattttgacagctctcactaaaaatcttccctttccgcttgtgataatgtgaaaaaagaccgaactcttcagtccgatcttttatttctttattttttaactgattctttcaatgctttaccggctttgaaagcaggtactttacttgcaggtatttcgatttcatcacctgtttgtgggttacgtcccttgcgtgcagcgcgttcacgaacctcaaaagtaccgaagccaataatttgaactttttcatcatttgacaaagtttcagtgattgaatcaaagactgcttccactgctgctgaagcatcttttttagttaaatcagttgcttgtgcaactttatcgattaactctgacttattagccatcgttgttacacctcctgttaaattaacgaaaataaattattttcgtttaaaataaaagacattgtcatcgcgacaatacattagtaatgtaccatataaaccttgatactgcaatcattttaaggcatattcattttaaatttcaaatgttatttccttgctctagggattatctgaatcggagtgccatagaagtcaaagctttcgcggaatcgattttctaaaaagcgctcataggagaagtgcatgaggtcaggatcattgacaaaaaccacaaaagtaggtggattagtggctacctgggtcgcataaaagaccttgagtcgcttccctgacttactaggtgcaggattgctggctagtgcatcactcagcacatcatttaagagggaggacttgacccgttgattgcggttataatagacccggtcgaccaattccgggatgacttccagtctctgcttggtcttggctgagacgaaaaggattggggcatagtggaggtagcggaattggtcgcgaatttgcaactcaaagtctcgcatggtgttagtctcttttttaatcgtgtcccacttattgactaaaataataattcccttgccggcttgatgagcatagccgaaaaccttcttatcttggtctctaatgcctgtttcagcatccaggacacacaagaccacatcagaccggtcgatagctcgctgtgcccgcataacagaatacttttcagttttttcatagaccttgccccgacgccggatcccagcagtatcgatcataacatagtcctggccatcctgggtcataaagggagtgtcaattgcatcccgggtggtcccttctagttcagagactataacccggtcttccccaataatagcattaactaggctagacttgccaacattgggacgaccaatcaagcagaacttaatggtatcttggtcataagccatattggcctcattaggaaagttggccaccactgcgtctaagaggtccccaaagcctaggccgtgagacccggataccggaagggggtcacccaagcctaacccgtaaaactcatatatttcatttctaagctcaggattatctgttttattaacagcaaggaccacgggtttgttggactgctgcaaaattaaggctacctggtcatccaagtctgtaatgccctctttgacactggttaccatgacgatgacatctgcttcatcaatggcaatttcagcttggacttttatttcttcatgcaagggcaaatcatcaaaagtgattcctcccgtatctataacagaaaagtctttgcccaaccattcagcatcggcataaatacggtcccgggtgaccccgggttcatcctggacaatggctaagcggtctccaataatccggttgaaaatagttgacttgccgacattaggccggccgattatggctactaaaggattagccatcagtacaccttctttctttctcttttaatccaaaagaaacccacctaacaactggcctcaaaccggtctgttagatgggtaagcttattcctttagcaagctttattcgtcatcatcattaaagaagtctgacaattgatccccaatttggtcacctaaggagaaagttgattcattttcttcgtcacgtaaagacggttgtttcacgttgacagatgaatctttttgtcgtctttgtttaccagaatttcctgagttattagactggttgccgcctttaggggcatcttctaaggccttgatactgagggagacccgttcacggtcagcgtcaacgtccagtaccttcacttcgacttcttcaccagttgaaacaacttcatgtggggtttcaacgtgcttgtgggctagttcagaaatgtggactaaaccttctacaccaggtttcaattccacaaaggccccgaagtcggtgatccgtttaacagtccctttgacaacactacctgctgggaattctgtttcagcatcttcccaagggcctggtagggtatctttaatggatagggaaacccgttctctctcaatatccacttttaagatttttacttcaacttcttgacctttttctaaccggtcccctgggtggttgattcgttcatgggcaatttcagaaacgtgaaccaaaccgtcaacgccacccaagtttacgaaggcaccaaagttggttaagcggacaacagtccccgttacaactgatccttcttccaagctttcgagtgcttgacgccgttcttctgcttcctcttcttgtaaaattgcttttcgggaaagaatcaattggtggtcattcgggtcaatttcaatgattttgaattcataggtgttgccttcgaattcacttaaatcattgacaaatttagtatctaagagagaagcaggtacgaaacctcttacacctaaatcaacggtaaccccgcctttcacaacgcgagaaacaggtgcttcaatgacttcatcattatctgctttctctttcaattcgttccagatacgttgttggtcaacatttcgtttagataagatcaagctcccttgttctttatctttcacgtcacgcaagacgacaacatcaatattgtcgccaatttcaaccacttcgctaggatcatcaactcgagaagcagaaatttcacgtaaaggcacaataccttcttggccgccacctaaaccaacgacaacgtttttatcgctgtcaattgttagtacttcaccagaaacaaggtctccaggcttcacatcgacaacttcttttaaaacatcatccattgatgcattttgatctaaattattattctcttctgacatcttactttgtcctcccaatgcgatatttacatacagttatattatacagaatataaagaaaaattgccaatagtatactgacaaatcagtgtaaaccgcattttattttaaaattgttgtaatattttatctttaacttcttcaatagtcaaggatgtggtatcaataaccacggcatcttgggcttgcttcaaaggagagacttccctagtcgagtctagttggtcccgtttctttatctcttcaagcaagtcctggtaagtgctactgatgcctttgctttggttttcttggtaacgacgtctcgcccgctcttccggactagcttccaaaaaaatcttgacttcagcatctggcagaacgactgtgccaatatcccgtccgtccatgaccacactaccctgactagccaactcttgctgacgccggaccatttcttgccgaacctctttatgactagagacctgagaaacggcctgggtgacatcattttgtcggatagccaaagacacatcttgtccgttcaggtaggtcaattggtctccatttttctttgcaaaagaaatcttgctttggtcgagtaagtccaataaggatgggccatcatggatatccactccctggtctagggcatggtaggtcaaggcccggtacatggcccccgtgtcaatgtagataaagtttttctcgtctgcaattaacttggccaccgtactcttacctgatgaggctgggccatcaattgcaagggctaacttgtttttcaaaaactctctcctagacatttaataaactaacagttcgtctccggcatgaatcgatgaattcactgatagaccatttaactccagtaactcatccaaagtcatcccatggttaacagcaatccgatagagattgtcttggggctgaaccacataggtgttatagtcttcttcaggctcgggctccgactcaggctctgtttctggttcggcttccggctcaggctcttgttcaggttcgggttccggttcaggctcaggctccggttccggttctggttcgggttccggctcaggctccggttcttcttgatcttcttggttttcttccggatcctcttcagcctcgtcttcctggtcctcctggtcttcttcaccttcttgatcttcttgatcatcatcttcttccacctgggtctgggccacttcttggttaggatcattaggatctaatgggcctctccctcgggtaaatatgtaggagaagacgataattgcaatcaataaaccaagcagaacaacagttactgttaaaataggagagacactcgagttccctctttggctagttcgggattccttctccttattttggtcatttaattcttcgtcaaatttttttgaccataactcttcatctttttcttgcttttgtttattttcatgctcattattttgctcgtcagacataacttccctcctcgtccttaagattaattttaacatattatttactgataatacattggattatataaagaccttaaaattttatcgacaggcttgatctctaaactatcctcttcctgaccttcttggccatagaattgtttttcaatacccggctggcaaacactgcagcaaaattcttcatgatgaggagactggtccccgaaataagccaacagagattggcgaatgcatcggtcactgtcaactaaactccgcataaattggacttggtttaaaatatattgcttacgttggtaaaaaaatgcgagggtatcttccagcgaccatccttggtcgtaaaagtatttaattaacttatactggttatcatccttatctttgacttgctgaggcttgcgaaaaacaaattggatcgtttgtgcttggggaatcgattttaacttcaacttagcttggagtttttcatctcctctttgataaaggcagagggccagaccagcccgaccgtcccggctgcaacggccagtttcttggagatagacttccggatcccctggcatatgatagtggataacgaagcgaatatctttcttgtcaatccccataccaaaagccgaggtcgcacagacaacttggatctgctgggctaaaaattggttttgaatcactcttttatcatagtcggacttgtctgcatggtaactttcagcacgaaagcccctttgaactagagcttgggcaattcggtcagcctgttttttactagaaaaatagactagaccaggctttttcaagttcttgactaattcaaataagcgctggtccttgtcttctacctcttcaaaagaatattttatctcagggcggtcaatttttgccttgattacctggctttggtcagggtcaaagtccaaaagcgacataatttggtcctggacagccggtctagcagttgccgtcagagccattagagttggcttgtccaaggatttccgaaaactcgcaatctgcaagtagtctggtctaaaatccatcccccattggctgacacagtgggcttcatccacgactagtaaattaatatggatttgttgcaataagtccaagacataggattgggctagcatttctggagacaggtaaataaacttataggcttttatgttagaccggatgtaagcccgctccattttggtcaagcttgaattaagggcacaaaccctcttctcccctcttaagcggattttatcaacctggtcttgcattaaggaaattaaaggagaaatgattaaagtcgttcctcttagcagatatggaaataattgatagcaaacagacttaccagaccctgttggcagtataactaaggtgtcttggcctttgagggctgattcaatactttctttttggcctggcctaaagaaatcgaaggcaaagtgttcctttaatacagcttgtaaatccatggtcattgccggatcaactccagttctatcaaacggtagtggtaaaattctaattcgccaagttggtctttggcttgggcatatcgcggggttggattttgggcaaaaaagtctaagagttcccgacgaatttggtccggaactaaataggtcagctctacttgggggaatttaaaggcaatctcaaggtagtgctccttaatggtaccaagcttgactcccttgatttgggcgatttgatccaaagacttccttttaaccattaagcgaaaagtttggtaggcggactgggtcaagccgtaagtttggacttggttggtgtaatttaaaagcttgcggtggagtggaaaagactggccttcctggtcaagtaaggacagatagtaggcacaggcttggtgaaagacccaatagatttcccctttttcccaagacaaaaatcttgcaagctggtcaagggtaagcccgaaaaggtcgtgcccggttaagtattcgctaagattcgtgccgcttggtcttggacttggctcagcaagagtccttgctctttcatccagcttgcttcaaagtcttgtacactagacttgactgatttgacaaagatttgacttttcaaatcacttttcaagggcaggtagtgcttgttggcataacttttttcagacacgacttgggtcataaactggaccatttgccaaaaatagtggtagaaaggaaaagttaaaaaagtgccttggtctcttagcgagctgtggtcagcaaaatactggtcaagctgggtttggccttgttttgagacgataaatttatcctcatgaggcgtgggcttgagccagccctgcttcaaaaaaatcttttggcaagcctccacttgatttcgttttaacccaggcagggttccgtagtataccttccaaccattgacctcagtcaggtacaagatggtcggtgtcgaccggccaatggtcacattataaatttgaccggtattggctggtttttgatacatggacagcaagatatgcatcaggtagttatccatttttttgcccccttccctttaaagtcagaaccagtatactaaaaatatgaatctactgcatcaaaaaatccttcttggaagcaagcttccaagaaggatccaaaaccttaacaactaggaatttgagacagaagcaccgggttgttggtctatagggtcattaaagtagcgttttctctgcttattcagccaagtagccatgcgttcataaacaatatagactaggctagagaccaaggcacccttgatcaagttgaaaggaactaagaagtagatgatataattagccactgacccagtgagttcggtaatgtcaaagcccataacggttaagtaggcagggagtacaaagaagtaattagacagggtcaacatgaaggccagaacaagagaagccacgagaccggctaatagttttgtttttaaattcaattttttattgaccgtaaagtaatacaaaggtagggtgagagaaactgaagcaacaaaggaagcgatagcccctacaggaaagcctgcttcgcccccagtaaccacgtagcccaacaaggaccggataaaggcaataaagacaccagcaacaggtccaaagacatacatgccgaagaagataggtatgtccgaaaaatcaattttcaaaaaaggtactgtgggaaagatagggaagtcaaagcgggagataataaatgcaatcgcagccattgctgcaacccctactagacgttttgtcttggtattttccataaaaatcctcctatattttgtacttttggcaagtaacaataggattcatcatgagggttttggccaataaaaaactgtttatttccaggggaaataaacagagtactaatatcctattagcctcatcttctttatccagactttactgtcggtactggagttgcaccagttcagcttaacgctcgtggactttaccaccggtcgggatttccaccctgcccctgaagacgaatcaatttattaacttaagcatagtttacacctagcacctgttgatgtcaaggcttacacaaagaccttatttgccgactgcttggtaaagctttctgacttcagcattttttaattcccgccactggcctccgtccaagtcatcaacccgcaaaaaaccataagctaaccgggtcaacttgactaccgggtgaccaacttggtcaagcatttttttgacttggtggtttttaccttcatggagcctcaattcaaccatggacttgtcactggcctggtcgtattcaatcaacttagccttggctggggctgttttttccccatcaataaccaggccttgttccaactgggccaggcttgactggttgatgagccccttgaccttggcccggtaagttttttcgaattcatagcgggggtgcatcaacttattggctaagtccccatcattggttaaaagcaaggcacctgttgtatcataatccaagcgaccgaccgggtagattcgctggtttaggtcttggagtaagtccaccacagttggccggcctttggggtcatccacagtcgaaacagtccctttgggtttgttcatcaagacataaacgaggacttctctttctagtggaatgccgtccaccttaaccaggtcgtcttttttcacctggactcccatgtccgtcaccacttggccgttaaccgtcacccggccttgcttgataatgtcttctgactttcttcgggaagccactccggcatgagccattaccttctgcaatcggtccacattctcactcctcttcttttcggttctggttaaaatcaaacaaatctagttctttatttaagggaatatcatctagggggggcaagtcctctaatttctctagggcaaaatagtccaaaaactcagctgttgtcccatataaaagaggtttgcccggtgcctctaggtgtcccatttccttgatcagagaccgggcttttaatttttgtaagacactagaagcactgacacctctgatttcttcaacccccatccgggtaatgggttgcttgtaagcgatgatagccaaggtctccaccatagaccggctgagtttttgatagccaggtgactgggcataatctttaattagctgcttgtagttgtttttagccactagccggtaattggggccagttttaaccagggtgatgccccggtccctattcgcttggtaggattcggctaattggttcaaacaggtttggatatgagggctggtacttttacaggctcgggccaaatcttggctagacatgccttcttccccggccacaaaaagcaaggcctctatttctcctaagtccgtcatctaatcctccccattccagttaattataatctcatcatctaagtgatcttgactaagcttaactcggttcaacttggtcaattcgaggagggctaagaaggcggtcaccaattcataccgggactggtggtcaaacaagcggttaaaactgactggtccaggatggtctcggaagtcagccaccatctcttccatcttatccgaaacggaaactcgactagccttgacctggcttgcctggggttgtcttagtgcataatcattcaagacgcggttaaaggccgcttgcaggtcactgactgaaacctggcctggttttaaagttgggtcactttctaggtcagacaggtcttccttgggcttagaaatataagtcaagcgctggtcttctcgaccggagagatacttggaaatttcagtgaaacggcggtattggatgagcagggccattaagtagtttcttggatcctggccctggtcatcctcttctgcagagttagcctgaacctggtcatttcttggtagaagcatctggcttttaatggccataagagtcgctgccatgaccaaataatccccgccctggtctaaaaccatcacattggaagaatggatatagcttaaatattgctgggtaatctgggctatgggaatatcataaatatcaatttccaaatcttgaattaagtgcaaaagcaagtccaagggtccttcaaacacagccaaattgacctgccagttttgcttcggttgactagcttggttgtcttctgcttgtggaaattgggaccctttcatatcacttactccttagtcgtctaacttttcttgatccaagccagcctctccttcagactctgcatcagactcagcgttctttttcttttgccacttggtcaccaaatcactggtctccaaagtgctcatcatggtttgcacgtcatatttttccgccactgcgtcaatcatttggtaggcaattccctcattccggtaagagggattgacagcaatatggcgaaccaagatcaaatcatcgttttcttcaattccaatgaccccacaaaagtcatccgtttcgtcacttttccacaaaaaaagctgacggttatcctcattaaaatagaggtccatctcctctttaagacgggaggttacttttaaatcatcaatataagataacaaacccattgctatcttttcgtaatccgatttaaatgcagttaacatcttgttactcctttttaaacaatcttttgctaaacaaattcagcctcaatttcgaagcctatgaactgagccccatcctcagacttgaagtccctggcaatactggccaggttcaaaatattcttaaatagtctccaaaaaggctaagaccaaggatttaaacttgtctttgactgcctgggtagtctcaatcacttcttcatggctcaagctctcctgtaagccagcagctaagttggtgatacaagataggccagctaatttcatttgactgtgtttagcaacaatggcttcagccaccgttgacatccccacggcatccccgcctaaaatacccaccattttgacttcagctggtgtttcataagtcggtcctgacaaaccggcatagaccccttcttgtagagaaatgcccaacttttctgcttggcccaaaataagttcttggtaatcttggtcataactttgactcatatctggaaaacgaggaccaagttggtcatggttgaaacctatcaaggggttgtctccggtcagattcagctggtccttgatcaacatcaagtctccaggcttaaagttagggtttaccccgccagcagcattggtgactaagagactgtgaactcctagtgccttcatgacccttatgggaaaagtcacttctttcatggtgtagccttcatagtagtgaaaccgtccttgcatggccaagacttttttgcccgccaagtcaccaaaaatcaagagcccttggtggcctgatacggtagaagttgggaagtggggaatatctcggtagggaatagccaggcggttgtctacctggtcagctaagtctcctagacctgatcctaataccaggccaatttcagcctggcccattccctggtcccttaaataggcttgggcttggttaatgtcatctattagtgtcataacttcccccttaatttaatgagttcaagaaactcttgccgttttcaacctggtcaaggtcaaagttagcagcaattgtggcggcaatatcagaaaagtagccttgactaagttgacctggctccttaaaggacttggaataagctaaaagggggacgtattctctggtgtggtcggtccctgaagcagtagggtcattgccgtggtcagctgtaattaagagtaagtcatcttctcttaacttgtccagcaattctggcaaacgttggtcaaaggcttcaatagcctggccgtagccttgaacatctcttctgtgaccaaacttggcatcaaaatccaccagattggtaaagctaaggccggtgaagtcctggtccatcacttctagtagcttggtgatcccatcatcatttgactgggtccgaaccgcatcagttatccctgacccattaaagatatcccaaatcttaccaactgccttcacctcataacccgcttcttctaaatagttgagaacagttttgccaaaggggctcaaggcatagtcatggcggttactggtccgctcaaagttgccaggggtcccaatgtaggggcgggcaatgatccggccaatcatataaggctcttctttggttatacttctcacatattcgcagatatcatacaattcttcaaggggaataacctcctcgtgggctgcaatctgcaagactgggtcagctgaagtatagataatcaagtcccccgtatccagctggtgctgaccccattcttcaataatttcagttccagaggccggcttattggccactacgtctcgcccggtgtggtcttggatcttttggattaagtcatcgggaaaaccatccggaaaaactcgaaaaggagtctggatattcaaaccagcaatttcccagtggccagtcatagtatccttgccggctgatacttcttccagtttggtatagtaagcctggctttggtccggcttggcaactccttttaagtcttcaatcttacccaagcctagtttttctaggttggggatggttaagcccacctggtcagcgatatgacctaaggtatgactgccttcatcgccaaaatcttgagcatctggagcttggccaatcccaactgagtccaagacgagtaagtggatacggttaaatttcatggtcttcccttctcctttttataaaaattacatttaatacttttatacaagttgctttttagtaaatcataagtgagtgaggctaaaaatgcaagtattcttgcagagacttcattgcgaaatccccttactaagctttattcataggaagcaataagccttaaggtagaaaagagtgagctcatgagctcactctttattctttttagcccgaggatggtaggcattgtagacatcctggagcctttgcttggtaatatgggtataaatttgagtggtcgaaatatccgaatggcccagtagctcttgaacaattcgcaaatcagccccgttctccagtaagtgggtggcaaaggaatggcggagggtatggggggtcacttgggctttaatgcccgcctggttgaccagttgcttgattttcttccataaaccttgccggctcaagggccgtccccgggcgttaagaaagacgatattggtcgcttggcttgattttgccaaaagtctttcccggctattttctaaatagtcttgcaaccaataaatggccgtgtcagaaatgggaacaatccgttccttgtccccttttcccttggtttggatcaaggacatggtcaggtggaggtccgttagtttcaagtgtatcagttcagaaatcctcaagcctgtcgcatacaagacctctaagatggcccggtctctcaagcccagtaccgtcttagtgtcactcacttcaattaaccgctctacttcctcctggctgatcacctgggggaggaccttgcctttcttgggcgagtcaatgagggtcatggggtcctggtcaatataagattcttgcttgaggaactggaaaaatttacgtaaagaagacaccatccggaccatggaattgttagacttgcctttttgtcgctggtcctgcaaaaaagacaagatggtatagcggtctgtctgattaaagctaactaggttcttatcttgcaaaaaagcgataaattgccgaatgtccctttcataactcttgatggagttttcggacaggccacgctcaacccgtaaaaaataaaggtagtcttgtaaaattcctgtttccacacttgtccctactctaattcatcttgcgattctttcatttggcattcctggcagatgccgtggaaaatcagtcgatggtctttaattttaaaatggtactggctttcaatttcttcctcgacccctttcaaatggtcactggctacctcttcaatctttccacaggataggcacaagagatagtggggtttatgctggttggggtgcttattgaggtcataccgggccagaccatcttggaaggtgaccttatttagaatattcaaatctgtcaaaatttccaaggtccggtaaacggtggccaggccaatgcccacgttattatttttaacctttaggtaaatctcttcagcactcaatcgttcattttcctggtcaatcatcacttgaaccgtaacttccctctgaggcgttaacttgtaaccagcctcagacagggtatctttgatttgatctaataatgtttgactcatgcctagcccctcactttatattaattacaaactagatatcttatataaatattgataataacttatttgtaacaattataaaatatttgtggggatttaacaatagttttcacttgattatttatttttattatgaagcaagtaggtcttttcctggtcttgggccactaaattatccttcatcaagtggcccaccgcccgcttgaattgccccttactgatcccaaaataatcccgaatagcctggggatcgctcttgtcgtggtagggaattgcctggttggggcttcttaagatggctgcataaatcatctgggcatcttcatcaatcacttcatgagccctcggtttcgtcgacaagtacaagaccccatcttctcttaagccaataatccggcctttaacttcttggcctagcctggtttcttcttctttttcagtttggggcaggtaggccaggtaatgatcgccagtgataagataatcacccgcagctttcaagtccaaaacccgacctgtcacatcattattgtgcaaactggccgtccccttgttggtgatggtcttaaacaagtcaggactagccagtttgccccacagccgatcttttttatcggtccacaagttaatatagacctggtcatcttttttgggccaatacttgacttcttcaggcaagtcatccaaggaaatggcaatatccttgtcttctaggccaatatcgacaaaaacgcccaagccccgcttgcggtcaaccacccgggcccaaccataatcatccaagctcacaataggtaaatccaccgtcatcaccttttgcttgtcctggttaaggtaggcaaaggcatctaccgtttggcctagttggagaggtttatcgcttttgacctcgtaggtctccccctccttttgggccaaatagactccctcaacctggtctacaatgagggcttttacaattttaccaagatctttcatcagttcagtcctcctaaaagaaaaaagggtgaccctagtgaatcacccagctttttctggttttaaatcgctgacgttgccccgcggtaaacaattccccgccggccgtcaactgtgatgacttcctcatcattgattaatttagtggcatttttagctgagaccacaaccggaatccccatggcaataccgacaactgcggcatgggaggtcaagccaccctgctcgattacgatggcagaagctcgctcaatggcactcaagtagtccttgtcggtggttttggcaaccaagacaccacctttgaccatcttgacattggcttggtcagctgaatttgctacataagccttgccgacaatagacttgttgccaaccccttggccttctactagcttggagccaaccatttgaattttcatgacattagttgtccctctttccccaactgggacgccggctgtgattaagatcaagtcgccttcttctacaaagccaccctcaaccgatttttgggtcgctaagttgaacatgtcatccgtagacttgggcttgtcgacaactgttggaacaaccccccatttgagggaaaggcttttggctgtttggtctgagaaagttgcggctaaaataatggcttggggccggaatttggaaatcatccgggcagtgtggccggattcagtcgctgccacaatggttttaatcttcaagttcttagcagtgtggccaactgcttgcccaatggcttcggacaagtctgacttgtcgaattgtttgagtgaataagcatcttgaccaaccaaggctgtttcggtccggaccgcaatattagccatggtacggacagcatccacagggtagtctcctgcagctgtctcgcctgagagcataatggcatccgttccatcaaaaatagcattagccacgtcagaagcctcagcccgggtaggtctggggttaacctgcatggagtctaacatttgggtagctgttatgaccggtttcccaaccgagtttaagtgtttgatcatttgtttttggacaattgggacttcctcagctggaatttcaactcccaagtccccccgggcaaccatcaaaccatctgatacattgacaatttcttccaggttgtcgaccccttcttggttttcaatttttggaataatctgcacatgcatagcatcgtattcctctagcaattcagtgatttctaacacatcagaaggacggcggacaaaggatgcagcaataaagtctatcccgttttccaaaccaaagataatatctttccggtctttttcggtaatcccaggcaagttaacggaaactcccggcacattgacgccctttttattttttaaatttccactattgagggccttggtaacaatttcttgcttgtcttggtcaatgtcagtcacttgtaggttgatcaagccgtcatccagtaagatactcgaacccacgtggacatcctggatgaggtttggataggtgatggaaaatttttccttggtcccttccacctcctccatggctatccggatttggtcccccttattaatattcaccaaaccgtctttcatatcatgggtccgaatttcaggtcccttggtatccagcataatcccaatgtgctttttggctttttgggcagcctgccggatatttttaattcgtgctaggtgctcctcatggtccccatgggaaaaattcaagcgagcaacattcatgccttcagcaactaattggtcgagaacctgaggagattcactggcaggacctatggtacaaacgatcttggtttttttcatcaattcactcacaatccttttttggtttaaatttagaaagaaatttcctggtttaattggtaaagggctaagttgctagttgtttccaacttgtctaaaacatcttcaatcgggttggatacaatggcctcattttttatcccaagggccaaaccacccttgtcttctttcaacaagtcaaccgctgctgctccaaaacgactagccaagacccggtccctggcacttggcgaaccgcctctttggacgtggcccaagaccgttacccggacgtggaagttgtcgatggcatcaagtttttcggcaaattcattgccccccataacaccttcagctaagacaataatggtgtgttttttgccgtgttcccgcccttgacggatcttttcagcaattttagtgatgtcaaaatcaacttctgggataataatttgctcagccccactggcaatcccggtccaaagggcaatgtcacctgcatcccggcccatgacttcaatgacaaaggtccggacatgggaggtagccgtatcccggatcttgtccaaggaatctaaaacggtgttgatggccgtatcaaaaccgactgtatagtcggttccggcaatatcgttgtcaatggttccaggaatacaaacacaaggataaccatgctgggttagagcatgggctccgcggtatgttccatcccccccgatggctaccaggccttcaatgccaaattttttcagttcctcaatccctttgagttggccttcttctgtggcaaattgagggtagcgggctgaatacaagctagttccacccttttggataatatcgccgacatcttgccgggttaattttttaaagtctcctgccacaagtccagcatagccatagttaatgccatagacttcaatgccttcatagagggctttacggaccacagcacgtatggcagagttcatgcctggtgcgtcaccaccactcgttaaaacggcaatccttttcatggttaatcatcaccctttttactttttggtcatttcatcatttctatagtaacattaaattgaaaaactttcttttattttcagtaagaattgttgataccggtcgttattttaagatacaagaatcctggcctaggaggtcctggagctggtttagggtatccgtccgtccgtcgaaattaaattttgctttgagctggagtgcttgctggctggcctggtcgtaaacaatcactcgcttctggccgggatgtcgggccaagatcttttgcacttgacgaaaactttctttatcttggttcaagtcagcaaatttcaggtaaagctgcttagtctctttttggacctggctggcctctttcatggtctggacttttagctggatttctcccttcctaacttctaccttgcctgagacgaccaggaccactccttctttgaggtaaggtaggcattcgcggtatacattcggaaagaccaccaggctaatttgtcctgtttggtcagccaggctaacaaaggccatgggttgttggtttctagtctgagttttccggacttgaaccagctgacctaaaacttggcaagattggccctcttctaaatcagctataaaggacgtttttaagtcctgtcgcagggagtcataccggctcaaggggtggctggagaagtaaaaaccggttaattcttcttcatattgaatgaggtcctttgggctaaactcttccaggtcttcttggcggggcttgagagtgtcaaaaagggtgatattgcccgaacttttggccacgaattcaatcgttgcttccaagcccgctaacatggtccgccgattagggcccatttggtcaaaggcccccaccaaaatcaatgcttcaatggggtcttgacttaagaattggctgtcaattttttcacaaaagtcacgcaggctggtaaaagctcccttttctttccgaatttcaaggatgtggttgacaaaggggctagccacccccttgaccatcttaagccccacttgaatgccattctgccgaaccgtaaaagatccaaggctttggttgatgtctggttttagtagtttaatttttctagcccggacttcatgggcatacttgtaaattttagccttgttaccccagtctgccttcatcacagccgcaaaaaaagatttaggctggtggaccttaaagtaggccatatggtaggcaagcatggagtaggcaacagcatgggcacggttaaagccgtagttagcaaactttgcaatatagttataaacctctcgggctactgactcactgtagcccttgtccaaggctcctcttataaatttttcccgtccctggtccatttctgactggatttttttggacatagtccgccgcaattggtcagcttccgacaaactatagccagctagttgggtagctacctgcatgacttgttcctggtagacaataatgccataagtgacttcaaggatgtcctttaagtcttcatgggggtagataattttttcttgaccatgtttacggttaatataattctcaatttgccccatgggaccggggcggtagagggcgttggtggcgacgatatcttcaaaagaagtgggttgaagctggcggaggacttttttgattccctctttttcaaattggaagaccccatttgtgtctccccgggcaaaaagatccagggtcttagggtcgtcgattggtatatcttgtttacttataccccctccctgcccttcatactggctaaagttcaagcagtctgctaggatggttaaattttttaaactcaaaaagtccatcttgagtaagccgaccgcttcaacatcctccatggtaaattgggtgttggggacctttccgttgccatcttgtaggggaagggaatggattaggggctggtctgacatgacgacaccggccgcatgggttgaatagttccttggcaggccttcgatatcctgggccatggcaaagatccgctcattttcatggctttgctggaccagtttttgaaggtctttcgactcgtcataggcctttgacaagctgatgttgacggtatctggtatggcctgggaccaggtcttcatgtcttcattcttgtaacccaaggtccgcataatttccctgatggaggacttagccgcaaaggtcccaaaggtcaaaatttgggccacatggtcaggaccatacttccggtagacatagtccaagatgacctggcgcttgttgtctgggaagtctaggtcaatatcaggcatggtaaagcggtccttgttcaaaaaacgttcaaagaggaggtcataatggatgggatctacccccgtaatgtagagggcataagataccaaagaagcggcagctgacccccggccaaaaccagtctcaattttttcctggcgggcaaattgcatcaggtcccaaacaatcaggaagtagtccgaaaagcccatggaagaaataaccgctagttccttgtctagacggtcttggtagtcttggccgtagcctggaacccgttcttggagtcctttttgggcaagcttgccaaggtaggagtccttggtctccccttccggcaggtcaaatgcaggcaatttagcctgaccgaggtccagggaccagtctactgactgggctacatctttagtatttttaagggcctgacctaaacccacctggttaaaaaaagactccatttcttggggactgcgcagggcataattttcccgagcctgggtgtcaaattgaattttctggttggctttgatgtggcttaagatttccaaagtggagacttggctttcttccaagcaacggacgtcagataaggctaagactttcaaacctccagaatctgacaaggtccgggctaactggtaaattttttgatcttggtctggcaccagacccaaatatgaatggggcaggttctgagtcatcgcggtcaaattgcttgcctgcttatctaagaggtctgctttcacttttgggtcagagcttgggaatattgtatagaggtcctgggccacagaacggacttggtcaagtgtaatagcctgcttgttaacttgaaggtcagtcgataaggctaagagagcctggtagccagccttgtttttagccaggagggtgacggttattccttcgtctaggtcagcccgtagtcccataatgggtttaatgccatgctttttggcttcttggtaaaattcgaccgctccatgcataacattgtggtcggtcaaggcaacagcctccatgccaagctccttcaggcggtccatcaggaggggcaattggatggtcgaagccatcaaggtgtaagcactggtcacttgtaagtgggtaaaagtcatcttgtcacctcttcgtctaagacatatttgtttcaatcttttattttatctcgctagctcgttagaagcctgttgcaagcaaaaagaaaaggcgcatgacacgacgtggtcatggccctcttcttttaaaatcttgttttaccgaatacctagggcaatacgggcataccgggtcatgcgagaagtatcccaggcagggtaccagacgagcttgacatccagttcattgatctcatcaatctcttccatggccttatggatatcttctgtgatcacatcagccaaggggcagcccatagtggtcaaggttattttcatttcgcaataaccaccgttaaaaacattaacttcataaatcaatcctaagttgacaatatcaatccctaattccggatcgatgacggcttccatggcctgcataattttatccttgatatggtcgatctcttcttgcgaccatacttcttcttgttcagccatttcaatccccctctatctatacttatctttagtttaccataaccatgtctcttgtctagtctagacaacttagctttttgcttcgtttgtggtaatattggtaaaaataccctgactaggaggataagatgaatcaaaaattaattgccattgacttggacggaacgaccctgaacacccagcaaaaaatttccaaacggaccatccgggttataaaggccctccaagaggcgggacaccttgtgaccattgtgactgggcggccctaccggacaagctttaactattaccaagacctgggcctcaaaacccccatggttaattttaacggagcttactgccaccacccccaagaaaaaaactggtcgcctggctaccgaatcaccctgcctagcgatgtggttagtgaattattccggctgaagcataatgacaaggtcaagctagtttcagctgaagtggatgattcagtttatacgtcaagtcactatatcccctaccctgattttttcccacatggaccaggtcaagccaaatatcttggcaaccaggtctttaaccaagaagccacctgtgtgaatgtctttacccaagacaagtacttgcagcggaagttggaaaaagaaattattgcagactacggtaattttgtggaagtccggacttggggtggctttgccccttgcctggaaattgtctcctccggcacccaaaaggcaatgggtttggaacaagtggctaagtactacgggatagaccgggatgacatcttagcttttggcgatgaaaacaatgactatgaaatgatccagtatgccggcattggggtagccatgaataatgctattttaccgctaaaagagattgctaacgacattaccccctacagcaatgatgaagatggtctggctaggtacctagaaaattacttcaatgtgtagttagatatctcaaataaaaaaagcttgcaagtccgttttggcttgcaagcttttatacttgatattgaccttattctgttacaggttgatcagctaacaattcaatttggttgagcccgtattcttgagggtctgcaccagggactgaactgtgtacgaattgggatacccggtcgttaaccaactgcaactctgttcgccagaatgtcgggattgttggggcttcatccatgaagaattcttgccagtcatagaagacttgggtgcggtattcatcatcaaaggattcatccgataccaggtctgctaggaattggttgttttcttcactttcgtaacgtgggtagttaaatggcgcatttggtccgtataggccatctggtgtagggtcggatcccactccccaacccgcttcatagacatcaatagctggatcgtccccttgaactcggtcgtagaaggcattaacttcgtggagtcgtccttctaagagggaaacgttaaggccaatttcttcccaagcttggatatagtattgggcaattggttcagccacttctgaccccgcacgagcggcataggtgatttctaatggatcgccattcgggtcttcccggaagccatccccgtcagtatcttcatagccggcttcgtccagtaattggttggctttatctgggtcatatgggtagccctctaaatcatcccggtggaagtcaggaaagttcggtacaatgtgggagttggcccggcgtcgtagaccgttgtagaaagtctccccaacccggtcaatgtccaaagcatatcccatggcttgacgcaagtttttgtcagccattttagcatctgggttaaattgaacactttgactttcactgtcccattcacccatcttaaagccaaggtagtcgtaagactgtcctggatagcccatggtagtgtagccaggaatgccgtcctggaaggtatcaaactggtcggtcggcatggagtcaacccagtcaaattccccggctctaagggcttcgacggctcctgataccggaatccgttcaatggtaatcccgtcgatcttcggcgctccgtcatagtagtcttcaaaagcggatagctctaaggactccccagggaccacgttgtcaactttgaaaggaccaaagccgattgggttctcacggatattagggtgggattcaaggtcagcagctggaatatcacccaagtagtgtcttggggcagcataagaccaaacgcccccaccggcctgggtcattttagggttaaagtccttgtagtggatggtaacggacatttgatcctcagacaattccaaacctgagatagagtcagcttctcctgccttgaattcttccatcccttcaatattggtaaattcatccccataccggataccagtgtagtctgggtccccaataatttcgtgggcaaagactacgtcgtctgcggtaacctgctcgccgtcatgccagtagactccgtcacggacggtaatggttgcggtagcattggcttcgtcaaattcgatatccgcagctgttccccattcttctccacccactagggcgaagttttcatcctgggttaatagattacctaagaagtaacttccgatggtggagtccgtattaatttgatacaattggtggtcaaagataccagtccaagctgtgtctgaaacgatcccaacctgggctacaccgccatcgatagggtcgccttcattggatacagtggattcaaattccggtacagaagcagcctggtccccttcaccggagtcttcaccagaaccttcgccttcttgacctgcttcctcaccagtctcttcgctggtagtttcttctgtttctgcgcccccgttgcccccgtcattactttcgccgccacaagcgactaagagtagagctagactggctgatccgactagcatggcatatttctttcttaatgacataataattccccctataaggtcaatatacttatcctaaacgttgtttagcgtcggttgaccgtttaagagcctgtccgacgtagtttatacacagcatcaaggttaggatagtcaatgatgccggcaaccaaacccaaggtctaagctccaggttctctggagaagttgcagcagataccaaggtacccaaagttgggatctctggcggtaggccaaagcctaggaaggtcaaacctgtctctaagccgatattagctgcgtaagataaaatcaactggatcataattaaggatgccaagttaggtaacatttcacttaggataatcttccaagtcggtgtccccatggtcttagaagcagagatataatccagctccccttctgacaaggcccgactgcggatggtacggcagaaaccggtccaagcgaagatactcataataaaaacaaatgatgcaattgttacttctggaataataacaataaatacgataacgatcattgttgtcggtaaaatcatgataaagtcagtgaaccgcatgatggcattgtcaacagctcccccgtaataacctgatatgacccctaggccaataccgataacggccataatagtagttaccaagaaaccaatcataacagaattaccggtccctacaatcagctggtgaaaaacgtcaatcccactttcatcagcccctaggaggtaggttcgctccccgttccaagcatcgatgaagttagaccattcaaattctaccggcgggtggaagcggttgaagacatcaacccgcataacttctgggacatctaagcggatggtccaggcgacgacaaaaagtgcaatcaagattaagatgatcaaggcagtcaaggcaactttatcttttttaaattcacggatgataactttaaagcctaaaggtggtgtcgatttttcaacgtcactggccacagactccgcatagttactatcaactttcggcatatgctccgtcctttctagctttaatctatcctaattcttgggtcaaccatggtcatgatgatatcggatatcaatgaaccgacaatggcaattaacccgtaaagtaggactaaggatacaacgactggatagtcacgaccagtaatactgttaaggaagaggacccccataccattgtaagcaaaaatttgttcaataaagatggaaccatttagcaaggtaacaatgatgaaaccaatggaagaggcaatcggtaagaaggaattccggaaaatgtgtttagtgtaaaccttattgactggaacacctttggaccgagctgtgcggacaaaatcccgactcttggtgtcgataacctcactccttagggtttgggtaatggagacagtccctaacaccccactggtaaagccaggtaggatcaagcggtagatcatatcgagatagtattctattgttcctggtcttaagttgacattaaccgtcccacgcgttgggaaccaaccaagtcggtagccaaatatgtagaccattaacaaggctaggacaaagactgggatggcataggagacatagttatatatcaagacaagtgagtcaaaccaggaatccttgtaccggccggcaaaaagtccaaatggtagggcaatcaggtaggagaagaagatcgatacaatccccaatcgaatggagttggcggcccgctgaccaataatggtagcgaccggtacccggtgggtaaaacttcgtccaaagtctccttgcaaggcattggtgacccagttaaaataccgaaccggcaaggggtcatttaatccagcagcttcacgcatctgttcaatctgtttagcatccatattcgggtcgattaggcctgtaaacggatccccaggcataaaattagcaacgataaagactaatagacttaacaaaatgatctgggggatcataattaaaatccgtctaacaactgttttccacattatgcttgtcccccttttgcagtttcgacttctttcgcctgacggtcactatccttagcgtctggtttaaaggccacaaaatggttgtcttcatagtaggtcaagtcataaactcttccgtcaggatcgtaatattctacttcttgggccctatattcagcctctacccgctggcggttagccttatgttcctcccgagtattgggattcatttcaggaatggccgataatagacgcttggtgtagatgtgttggggattgttgtaaatcttgtccttggccccctgctctacaaaccgtcctcggtgcataatggcaatatcatctgacatgtgcttgacaacccctaggtcatgggagataaacaagtaactcaaaccatattcagtctggatccgtctcataaagtttaagacctgggcctggaccgataagtctagggctgatgtaggttcatctgctatgattaatttaggattgcaagctacggcccgagctacaccgatccgctgtctttgccctccagagaactcgtgagggtaacggtacatggcattttcacttagtccgacgatctcaagtaactcaataacccgtctagtaacttcatcactggagtagtcgaaatagttattgatgggttcagcgatgacgtcccggatccgttttttaggatttaaggcagaggttgagtcttggaaaatcatctggacatctttattgtaatcggcatattccttcttccggcttctggccttattggtcacttccttgccgtcatagtaaatgtggccgtcggtaatggattccaaaccgattaatgccttgccaatggttgtcttgccagatccggattcccctaccaagccgtatgttttaccagattcaatggtgatggatactccatcaacggccttgacataggtttggatggtattaaaaatgccaccccggatcgggtagtggaccttgaggttgtctaattgaattaaactcatttttggtcctcctccccttcaaagtagaaatgcttccaggaattccctctgaccttgtggttaggtgcaatttcagttaattgcgggttctcgtcaaaggcttcatctggcaaccaaggcacccggttacggaagcggtcacctgtccgtggcaattcttctagaggggggacactcccttgaatcacgtgcaattcttccccttcttctaattcatgggggactgacttgagtaaggaccgggtataagggtgtttagggtcgttaaacaagacatcgactggtgcttcttccacaatttggcccgcatacatgactgctacccggtcagctgtctcggccacaacagcccaagtcgtgggtaatgaggataatgcccgattcagtctctgcttggatttccttcatcaagtccaaaatttgagcttggatagtcacgtctaaggcagtagtgggttcatcagcaataatcacgggtggcttattggccaaggcgatggcgatcaccacccgctgtctcatcccaccagataattcatgggggtaagacttcatcacttgctctggtcggggaatcccaacctggttcaggagttctaaaacccgggcccgtctttctttttcatttaattcagagtggtaaatcaaagactcggcgatttggtcataaatggtcatcacgggattcaaggatccaagcgggtcttggaaaatcataccgatgtcgttacccctgatcttgttgtagagtttctcgcttaagttagttaaatctaaatcattgtagatgatctccccggaaatcttagtgttgagggggtcatgcaagccaatgatagcagttgccaaggtggacttgccacaaccggactcgccaacgatggctaggatttcattcttgtccaaggtgatcgacacaccatcaactgcgttatggtagacttccccaaagcggaaaccaacttctaagttattgacttctaataagcggttttcaatggccactttccttcctccttaaatcatttccaaattagcaaaatgaaataatttaagatatcatatccatctcattaatctcatttcttaaaggttatatttattattttaattataaaaattaaaaaagcaagtaaaattttaaaataataaaagtttttttgaggacttagtcaatattttctgaaatgaagtcaacagccttaccaactgtggtcatctgctctgcttcttcatccgaaatttcacggccaaagtagtcttccatttccatgatgagttcgacgatatctaaggagtcggctccgatgtcttcttggaagcgggtttctcgagtgattttactttcatccacacctaagcggtctacaataatactttgaactttgtcaaaaacttcttggtcttccatttggtcattacctccgtttttaattcttactcatatcttaaagggcttaatttaatacatgtattgtacactatttccatactttaggctagagattactgaattttcactttattttctcttgttcaaaatattgacttagagcttgaatggcctggctgtcaataatgtctctggcttgtttgaccgtgtggtagagagcttcagcattagccgatccatgggttttaataactggtgcccgagtgccaaacaagacagcgccaccaattttagaataatccaggaggtcttttaagctggataagtcttttttgatcaagaggccgccgagtttagtcttgacactacccgacttgatggtggacttgatctggtcaatcactgccttagctgttccttccatactcttcaagacagcatttccggtaaagccatctgtcacaatcacatctgctggtgcttgtaggatctcttttgcttcaatatttccgataaaatcaatagcctggttttttgacaagagttcaaaggcagacttggataggtcattgcccttgctgtcttcagtcccattgttcaaaagggctaccttgggctggtcaaccccccgcatatttttggcataataactgcctaagacagcaaattggtccaggtttaggggcttacagtcggcattggctcccaggtccatcagttgaaagaccttgtcactgtataaagaagggagggtccccatcaaggctggtcggtccaagccttttattcgtccaataattaaggtcccagctgtcagcaaggctccggtattgccggcagaaatcaaggcattagccttgccgtctttcacatctctggcggcccgaaccatggatgcatctttttttcttctaactgaccggacgggttcgtcgtccccttggataacctgactggttgctaccacttcaatattactaggtttctcacccaataattcatttacttttgcttcatcgccatacaagattaggcttacttggtccagttcactggcagctcttatagctccagctacgatagcttggggggcattatccccgcccattgcgtcaattgcaattctcatgtttgcctccttagtctaacaatcctttgctatttggttgattatatagaagataagtttttaaatcaatattttgggacaagtctgggtcctgattgaggtagtggatgctttctatcctggccttttccagaatgggtgcgtcttccactaggtcgccaattttaaactggggcaagcctgactggatactccctaggacatctccaggcccccgcatggttaggtccttctcgctgaggaaaaaaccatcattggattctgtcattacctgcatccgcttcactccattctctcccttggggtcagcaataaggatacaataagcttggcttgttcctcgaccaacccggccccgcaattggtggagctgggctaggccaaaacggtcagcatcatggatgatcatgatgcttgcattttggacatcaactccaacttcgattaccgttgtcgaaacaagaatttggacctggttatctttaaaggctgccataacttggtctctttcttcctttttcatctggccatggagaaggcccacttgatagccagtaaagacctggttataaaggtcaaagaggtctaaggcgttttgcaagtccaggttgtcagactcttcaatcaagggggaaactacgtaggcttgccgtccttggtccaattctcttttgataaagttaaccatttgactggaattttgattacgcaaccaaatcgttttaaccggtaagcgacccgctggcatctggtcaatgatagaagtatccatctctccataagcggtaatggacaaggttcgggggatgggggtagctgtcatggcaaggacatctggatccgggcctttctcccgcaatttccccctctgcttaaccccaaacctgtgttgctcgtcaatgacaaccagggccaggtctttaaagatgacatcatcctggattaaggcatgggtccccaccagcaggtctatttctccctgggctaaatctactaaaattttttccctttccttggcgggggtagaagacttgagtaaggcttgtttgaggtcagtgccagcaaacaagtccttaaaacttgcaaagtgttggtcggccaagatttcagtcggtgccatgatagccgcctgtttgcgaccagtaaaaaccgcatagatagctgctgctgccactaccgttttgccactaccgacatccccttgcaaaagtcggaacatttgcttgggctggagtaagtccttgcatatttcattgactacccttttttgggcccccgttaagtcaaaatccaggcttttaaaaaaattctttaagtctggcaaattgtaatggagggtagagccaggattggtctgggaatggtcccggcgaattttttgcaggcttaattggtaagtaaaaaattcagtaaaaataagactggtccgggcccgggtaaggtcatcgtcctggtttggaaagtggattttccgtatagcagtgggaaagtcatccagctggtatttttgagtcaggtcatagggaatcagctggggaatttggtcctggtacttgtcccaagcctgtttgattaacttaaaaattgtattctgcttgatttgcttgttggaccggtaaacagcctcttgactatcactttctccagcttttaatattttgatcccggttagggactggcgcttcaaatcccaggtcccaaagaccgttagttcatggttggcctggacttgtttttttaaatagggctggttaaaaaaagttaccggaataatggcctggtcaacattgaggcgaaattttaaccggcttttggttcggccgaagtaacttactaccccatcggaaacggcaagccctcttaagacaactttttcgcgatcttcaatctcctcaatgttccggacccttaagtcttcatagcggaaagggtaaaaggtcaagaggtccatgatagtctcaatgccaagttgctttagggcctccatacgcttggtccctactccagataagttttttaccgggtcataaattgacatggtcttgctcctttataaatgaaaaaagcggaaatgaacaagtcattcccactcttctaccagctggtctgactattctactgagataaggtaagggtagaccggttgatcgccttggtgtgattcaatttcatagtccgggaagacttcaaccaagcgatcgatcgtagcctgggcggtgtcttggtcgataccttcaccgtagataatggtaatgatctcactgtcttcttccagcatggattgaatggtggcctgcaagcagtcttcaaggtcacttttggctaagacaatgtcgccatccacaattcccatgtagtcatctttcttaatagcgactccatttatttcggtatcgcgggtggccgaggtgatttcaccggatacgacataggaagattcctctgccatggcttctgcattagcctctaggtcctggttagggtcatatcctaacatagccgataagccttgctggatggtccggctttctaccaccttgacattggctgaggcaacatccactgcctgcttggctgacatgaagatgttcttattattaggcaagatgatgtagttgtcagcaggaacctggtccaaggccttcaccaagtcttgggtacttgggttcatggtttggcccccagttagaacataatcgaccccgatagatcggaagaggtctgctacaccctcacctgctgccacagcaactacagccaggtcttttttctcttgggctttggctgaaccatcttgtccagcagatgaaccgccggataattgagagtgttgctctctcatattgtcaactttaatcttaatcaaggacccaaatttttggccgtaattcatgacctcacctggggtttcagtgtgaacgtggactttgataatttcgtcgtctgccacaaccaagagggagtcccctaagccgtccaagtaagaccggaattcgtcataatcaaattcactgtctacagtccggccttctccgattcgcaccataatttctgtacagtaaccatacttgatgtcttctgacttaactgcatcatggacaccactttgctggtgctccgccttgattaactggtctaagtcagccttgttgtcatcttcaacaatctcttctccagttagggctgacaagaatccttcataaatatagattaagccttgacccccactgtcaacgactccgacttcttttaaaacaggcaataggtctggtgtttttttgagggaggccttgccttgttccaagaccgcttccatcaagccaataatatccttttgactttgggctgcttctaagccagcttctgccgcttccctagccactgtcaaaacggtcccttcaacaggtttcatgaccgcattgtaggctgaatccacaccagccttaaaagcatcggcaaagtcttgaacacttaacgtttccttgtcttccaccgctttagaaaaacctctaaaaagctgggaaaggataacacccgagttcccccgggcccccatcaagagacctttagataaggacttagcaaggtcccctacctggtcggactgggattcattaactgattctgtcccagttgaaaaagtcaagttcatattcgtgcctgtatcgccatcaggtactgggaaaacattgagtgaattgacatattccgcattatcatccaggcgcttgcggccggtattgaccatatttttgaaatcttttgcttttatctcattcatcttatattttcataccctttctgactaacgatttgacacacggacaccttggacaaagacatttacagaagaagcctcaatccctaaagtcgatttcagctggtagcgtacccgttcttgaacgtttttagatacttcagtaattttaatgccataactgacaatgatatagacgtcaatgatgacttggtctcgctcttgtcgcacttcgatccctttagcgtaattgtcacgctttaagatctcgtttaagccatctctgacctgcttgcgactagccatgcccacaatgccgaagatctcggttgcagcaccgccaacgatagttgctatcacatcatttgaaacttcaatattaccattttcattgttaattaggagtgacatatcctagcccctttcaactccccgaaccctgtcaggggaaagcattgctatgcaaatagataaatacccttgcattctaccatatatatggtctgtataaaagtacaaggctaattgagcttattataccacatccaacaaaaaaagcttgatcccaattaaaatatgtggtaacttaacaaggtatgaaaactagctcgcaggcttgttttgatccagtcaacaagctgttaggaataaaggagggaagaccatggctaaaaaatgtcatgtaacaggacgtaaagcatcacggggtggccaacgttcacacgccaacaaccactctaaacggacctttggtgctaacctacaaaaagttagaatcttagttgacggcaaacctaaaaaagtatgggtttctgcccgagctctaaaatcaggtaaagttaaacgcgtataaaaaaatcgagggaaaacaccctcgatttttttatatctattatcccttactttgaaccaccatcactaagcctctgctgaagcttaagaccatatcctctcccccagcgaattcgttagagataagggctctagggactgcaaagtcctcatcttccaaggggtatttaacccccgacagggataagccggatactggcgtcatggctataaaggataggtagtctttgcctggctctttttttatctggtaagtcccaggctggcaaaaggaaacggtattagcaggatcaagcaagtacaaccgtgggatgaggtctttatactgatctaagtaaaccacatagctgatactgataaaatggtcgacccgacctccttgaaagttatatacatagattaaatcgtccctgtcatattcccgagccaggtctaaggccagttcaaaatcagtatggtcctggtctggcttgacaaaacgctcccctgcgtaggcatccacctcttctaattcctgctgggtcaaggaatcaaagtctcccaaggcaaggtctagagggtagccagcttgtttgaccaagagacttcctccgtcaactcctaaaacgaggtcacccttttggtaatttaaatccaggtcttgggctcttaagggggctcctaaaacaatatgaatcgtcatgacttaactcacccctttcttaacttggctatttggtctttggaacttttcccttggttaaaaatataagaaccagccacaaaaatatcagcgccagcatcccaagcttgcttagccgtttggtcattgatacccccgtccacttggatttcaaagtctaacccaagctcagtcctagtttgggctaattgatctatcttgtccaggcaagaaggaataaagtcctgaccaccaaagcctgggttaacggtcattaccaagacataatcgaggtcccttaataggggggtcaaggcttggttaggtgttcctgggttaatcacagcgccagccttcaaaccctggtctttgatcaattggatggcccggtggatatgctgggtcgactccacttggaccgacaggcagtcggccccggctttagcaaaagcttcaatgaatttttccggttggttaaccatgaggtgaacatccaggggtaggttagtatggggccggatcgcttggaccaagttggggccaaaagtcaagttgggcacaaaggacccgtccatgacatcaatatggatccagtccgccccagcctggtcaacttcttggacatccctttgcaagttggcaaagtcagcacttaataaggatggtgcaattttcataatagcctcctctagggtctagtattttggcttgcgtgtcattatttcttctaaaaaatagacatagtggcggtagcggtttgaagccaggtctcctgtttcgacacctgctttgacggcacatttaggttccttgtagtggaggcaacccgaaaacttgcattgggcccttcttgcccaaaattctgggaagtattggcttaattcttccttttcgatcccctccaagtcgagggaagaaaaacctggggtatcagcaatgtagccttcaaaaataggcaggagttccacatgccgggtggtgtgtcggccccgtcccaaggcttttgacgtttggccggtcaataagttcaactggtcattaagctggttcaaaagtcttgacttaccaacccctgactggcccataaaaaccacccgcttgtggcctataatggcttgcatttgcccctggtcaacctggccgtcctccgggcaaaggaagtcatagcctaggtcttggtagtaatcttgcagagccttgatttcatgaaccaagtcctggggggccaagtccagcttggagatatagatggctggttggatgtggatagactccaagacaaccagcatccggtccaaaagctgctgggaaaatttggggtcgaccgcagatgagatgacaaaggccaagtcaatattggcaataggaggccgggtcagaaggtttttccggtccttgacttcaacgatggtaccgtcttgcccttcctctaagtcaaaggtcacatagtccccaaccaagggggttagcttttctttgcggaaaagcccccttgccttggtccggtaagtttgtccttgctcagttgttacataataaaatccactcaaggctttggtaatctgcccttctagcataaaccgctccttttaaatattttgaacttcttcttccttaatgacctgcccatccctcactatccggtaagaggcagactccccttccttaacgacaaagttaagggtccgggtaacatcctctgtaatttcaaaggataagacaggctcgtccatactgttttcctcgtcatcaatgtaaacttctatttcatttgggacaggatcttcttggtcatcctcttgtccacttggctggtactggatttgaaccaggcgggagaagctctcatagttagcttggtcttggtcttcttcctggtcttccccctcttctccttcgtcttcttcatcctgaccggcagcaggtccagttgagaagataacagtcacactatcattttcaaacaaggtggtccctggctccggactctggtccaccaccaggccttcttccacctggtctgacgattgatagtcgactgtcaggttaagattattgtcagcaatataatcgtcaaccccaacccgggtataacctgttaagtccctaaaggcaaagccttccggacctgtagaaacatcaaatgtgatcgtcgtatcctctggcttcacttcctggcctggtgagaggtcttgagaaacaatttggccactttcaatgtcattatggctaacttctctgctttcaaccgtaaagccaatttccgttaaaacggccctgacttcttcatagttcctgccggtgtagtcctcaaggctaaacaagtcactgccggtgctgacaaagaggtcaatctccgtgtcaaggtccaccttggtgccagcaccagggttagaccgggtcacatgaccttcttctatctcctcactaggctcttcgatcacttcatccacttgcaactgcaggtctgctaaaatagtctcggcttcttcaagtgtccggttttccaagtcaggcaattccacctggttgggggcagcactcataataaagtaaacaatcccccctaggagaagggctaagatgataagggctaagacaaggggccagcgtctttttttcttagtggcaggacttggtctaggtccggggcctgttgggttatcatgactatctcctaattggtcctgactaacctggtctcctatgggtgacatgacgatggtatcttcttggtccctggacttaggaacaaatactggctcattttgccggcttgggtctaaaactgtcattaagtcctgtctcatatcatagacggagtcatagcgtaagtcaggatctttgcaggtagccttaaggacaacattagccaaggactggggcacgttgggattttgctccctaatatccggtagatcctcctggaagtgcttgagggcaatcgataccggagattcgccactaaagggaacttggcccgttaacaactcatacaagacaatccctaaagaataaatatcggacttttgggtcgccatccctcccttagcctgttcaggcgacatatagtgaaccgttcctaaaagggaattggtctgggtaatagaatgctgggaaactgctagggcaataccgaagtccgtaatcttcacctggccactagaatccattaaaatattttggggtttgatgtcacggtggatgatgccccggctgtgggcatattcaatcccgtttaggatctggctcataatgtcgattatcgtatcattggggataggatagtggtcttttatgtaagtcttgaggtcggttccgtccacaaactccatcacgataaaggggtgggctccttcgccaacatcgtagatgctgactatattttcatgggataattccgtcgtcgagatggcttctctttgaaaacgttttaagctttcttggtcgtcaataaaggaactcgccaataatttaactgccacatctcggtccaaaaacatatcgcgggctaggaagaccttggccatgccacctgttccaattaactttttgatcttgtagcggttatcaatcttgttcccactcactttggtcctcctcctctccatgggccaataggtcaactaaaatcactgtaatattatcagttgaccctccatcataagctgtttcaactaatttggttagtttatcctctaactttgactcttgtcccaaaatttctcctatcgcctggttggtcaatacgtccgacaagccgtccgagcaaagcatgatatagtacttgttttggatgggaatgtcaaaaatatcgacttggggggactggggcaaacctaaacatcgggttagcatgttcctctgctgatgggttcgggcctcttcttctgtgatttgaccttttaagtataattcataggcaaaagagtggtcttcagtgactaattcaactccgttctggttagcctggtaggccctagaatctccaacattggcaaaaataacttctttatctaagaaaaccgccaagaccgccgtcgttcccatgccaaaaactgatgggtctttcaaactttcttggtaaatcagttgattggtctggttaagcttgtcttttaaccataaaatgatgtcttctttggcagttagggcggattcttgccaatgcttagccaggttctcggctgctatcttactggccaaatcccctgcctggtggcctcccatgccgtcacacaagacagctaggcacacgttactttggctcttggtcacccgaatataatcctggttagacttccttttacctttgatggatttaaaaacgacttgcatatgagtcacctcttttcattttctctctgcctacttccacttgcctcttttctttttaccaaacgagccaggtaaaagccgtctgagtcaaagtcactaggcaaaatagtcacctggccttcattatctaggtactggctttggtcaaaaggaattttttccaagaaaaattcgggattttcctttaaaaaagcttgaatgactgcctggttttcctcttgcaagatggtacaggtggcataaaccatcttacctccttctttcaacaagggaccggctgcatttaaaatagccaattgaagctcaggcaaggcagtcaggctggctacatccttgctgtagcgcatgtccggtttcctacgcaacaggcccattccggagcaaggggcatcaattaggatccggtcaaagtagttgtctggatatacctgaccagctatacgcccatccagctttttgacttgggccaagctagcatagccttgactttctaggctgtcttcaattaagtccagcttgtggtcataaatatctgaggcataaagttgacccccagcttcagcttcgagataagaagcgatatggcctgatttgcctccgggtccagcacacaagtcagccaccttataatggctctttaaatccaaggctaggcccaccagcattgccgactcatcttggattcggatagctcctgcctggtagagcgggtggctggtaggcaagccccctgccacaataaggccacaaggagccaggtcactcttttgaacctggtaaccactcgcttcaagttgggtacaggcctcttcccggctgaccttgtccaagttaactcgcaggcttaacttggccggtttattataagaggctgccatgtctatagcggtcttttgaccgtattgggtaatcaatttgtcaaccaaccacttgggcaggctataactgacccttattcggtctactgggtctgctaggtcttttgggttcctcaagtcgtggcggaggaagttccgtaaaactccattgaccaggccagacacccccttgtggcctctttttttggcatactgaactgcttcgttgatagctgcatagtcaggaatatggtctaaaaataccagctggtaaacggctaggcggaggacttgccggacccaagcctggagctttttaggctttttaatatagggttctaaataaaaatccaagaggtattggtgttggaggactccgtaaactaaggcagtcattaagttcttatcttcctggctggcattcatcttgtccagtctcgcatttacttccaggttggcgtaacctgcttcttggtcgactttctctaaaacctggcaggccacttgtcttgggtcatcttctttcattggtttggccaaattccatcccttcttctaattttgctccagccaagtaactcttaacgggcatctgactcttaccagcaggttggacctggtctaaggctaaaattgtctggttcccgcaagcaaccaggagttgttttttactagcttccacgatttgaccaggctttttgtccgttttctggtcaaccagatgagaatcccaaattttgaaccggtcgccctcaaaccaggtgtaagttccaggaaagggtctaaaggcccggatcttattgtagaggtcttgagctggctcttgccaagagatttcctcctggtcccggctaatcataggggcataagtgacttggctggggtcttgtttgaccccctgtccttcccctttaaaaatcttgaccaatgtgtcttctaacaagtcccggccgagatagcttaatttttcaaacaagatcccggtatcatcctctggttcaatctttaattttgcctggctaatgatattgccagcatcgatttcttgggtcatatgcataatggtcaccccagtctcctggtccccattccatagggcataatggatgggggcagcccccctgtagcgaggaaggagggaggcgtggacattgatactggcaaactttggcaagtccaagatctcttgcggtaagtactggccaaaagcagctgtcacaatcaagtcgggtgcaagttttagtaagtctttttcctggtctgacccttttagtcgctcaggctgaaggactgggatagcctggtcttgggctagtcttttgaccggcggcggggtgatgtttcctttgcgaccaactttccggtcgggttgggtcacgacagcaactacttctagggattcattggctaggagaccctccaaaatcggaacagcgaattggggtgtccccataaaaacaactcggtacaagtcagtcacatccttaaataaagttcatgggtttggggtcgattgaaataaacaagccctgagccacttgcttttggctagctttcaaaagctggtgcaagcggttttgcatccggtcttcatgcttgtatttaatgatagtctggaagtggtagcggttatgggtccgggcaatcgatcttggtgtagggcctaggacaatagcctggtcgcttaaagctggtttgataaaatgaacaatttggcccatggtcttgcttgccatagcttcattttcatggctaaccgtaatccggaccaagaagtagaaaggcgggtactggctggccttgcgtaagaccatctcctttttgaagaaactttcataatcatggtttttggctaactggatggcatagtggtctgggttgtaagactggataaccacctggccagtcacctggcctcgccctgcccggcctgagacctgggttaagaggtcaaaagtggactcaggtgcccgaaagtctggtagggacaaggctgtatcggcattaatcaccccaaccaggctgacattcggaaagtccaatcccttggcaatcatctgggtgcccagtaggatgtctgcttcttgatttctgaacttagccaagagtctctcatgggccccttttttacgcgtggtgtccacatccatccgaatgatccgggcttttgggaagacttggcctaattcatcttctattttttgcgttccagttccgtaatagcggatggaccggctaccacattctggacagtggtggggaatggcttcttcatgaccgcaatagtggcacttcatggttttggtatccatgtggagagtctgggaaatgtcgcaattagggcactctaagacaaagccacagtcccggcacatgacaaaggatgaaaagccccgccggttgagcaagaggaccacttgttgctttttggctaaccggtctttgattttctcctgtaagttcaaggaaaaagaagaccggttaccctggctgacttcttgtctcatgtctacaatatcaatgtcaggcaagggctgggcattggcccgcttggttaggcttaatagggtgtaaacattctttaaggttcgagcccgggattccaagctcggtgtagcactacctaagaccacaggggcttgatggtattttccgcgccaaatggcaatgtctcgggcatgatagcggggggtctcttcctgcttataggtagattcgtgttcttcatctatgataataattcccaagtccttgatgggggcaaaaatactggaccgggccccgaccacaatcttggctgacccttgttcaatccggcgccattcgtcatatttttcattgtctgacaagccagagtggaggatggcgacctggtccccaaagcgacttttaaatcgttctaccatctggggggtaagggaaatttcaggcactaaaacgatggctcccctgcctttttgaacaacttcatgaatggtttgcaagtaaatctcggtcttaccggacccagtcaccccttccagtaagaaaacttcatgggagtggtcttgaatgctttggttaatggcttcaaaggcagtcgcttgttcttcagttaagggcaagggcttggactcttttatttccctacctttgagagggtcgcggaagacttctttataggtcacttccagccagccccggtcttggcctgtcttgacctgggcgttggttaatttgtgttttttccgcacttcctgccagttgagggggtcagggtggtcagccaaaagctttaagagctctgcttggcggtaagcattgcttggcaagtctgctagaatgttctgataggcatccggagacaagcatgccttgatatacttttcctttttcttgttttgcttatccgtcactaggtagtggactgccacttgtccttctttttctagattcattaagtgggataggatcccccggtcttcagcttcctgccagtctatgctttcctttccttggaaaaggtcgtaaagcaagttgtcatcttcagtgtctaggagctggatccgtttattataccgggctcggtaaacagcaggcagcatagtttggtagcagttaatctggaagctataggtggtttgactcatatattggcccaattgcaagagttcttcatttaaaaggggcttaaaatccataactgaagcaatgtctttaagatcttggcccggatctaggtccaagtcagcctgatcacttaacagggagacgacaaaagcttggactagtcggtcccccttaccaaaggggaccaccacccgcatgcccggctcaatattggcttcaaggtcttggggaacccggtaggtataaggatggttggtctgcatcaccggaacgtccacaattacttctgctaggtcggtcattcaaactttcctttccaagttgattatttgggagaagcaggcaatttactggccaccacttcaataatcttttttgccatatcttttttagactgaaggggaagctcaagcggatcttggtcactggaaaaaacaagggccgcattttcatccgcattaaagccccggtctccccggcccacttcattggctacgatcaagtcagcttgtttggaggctaattttttttgggcatattcttcaaggttatgggtttctgctgcaaagccgacattgatttgttggtctttccgccggcccatttcggccaaaatatcaggatttttttccagttcaatggttaaattatcttgctttttcatctttttgtctgaccggttgactggccggtagtcagacaccgctgcggccatcatgagaatgtcatggtggtcatagaggtcactaactgtttggtacaagtctaaggtggactccacctgaaagcggtcaataaagggactggtcggcaagtcactggctgttaccaagctaacctgggccccagcttcataggccgcttgagcaagttggtggcccatcttaccagaagaatcattggaaatataccggacgggatcaatccgctccaccgtcccacctgctgtgacgaggactttttttcctgataggatacctggattcctagcaataataaaatggttaaattccgccataatccggtctaggtctggaaaacgacccaagccttcgtagccctctgctaaaaatccaatatccggctccatccagtaatggccctgttcaataaggaaggccttgtttttcttaagagcgggattttcatacatcttggtgttcatggctgggactaaaaaaatggggtggtccgttgccaacaaggctgttgaaacaaaatcgtccccaatcccattggccagcttgccgatgatattggcagttgccggagccacgatggagtagtcggcccaatccgtcaaatcaatgtgactgaccgattcgggctgaccttcttcaaaagtgtcaatctgaacctttttttggcttaaaacctgaaaagataaggggttaacaaattgacaagctgcttgagtcatggcaacccggacctccccgccttgtttgatgatttccctaagtaagtaaagtgatttgtatactgctataccaccagtaacatataaggctatctttttatttttcagcatctttgtctacccctttatatgatagtcactgcttattttaacaaaaataagaaaaatttaccttatcttgctcagttagaaaagtggccagacccatcttctatcctgtgattggctaaattaaaaagaaaggaccctttaccaaggcaggcaactggttggtaaagggcctttatcttattcgccttttaacttgcttgagtcaatcacaagatcacctgactctatttcttccagggccttgccgatattccgttcagacttgtagtggtcaagtaagcgctcatcagccaagtcttccgcttcatctaactggtgggcccgtttggctgctagcatgaccagagaatactgagaatcaatccggtccatcaagcggtctaatgaaggttctaataacattattccatctcctcaataatttctgtaaagtgtctaagattgcggtggactttcaagtgctcactttcaatgatgtgacggactttttgggctgcctggtccacactattgttttcgacaacataatcataatattggattaacttaagttcctgaacagccttttgaattcttttttggatcatttcaacgctatcggttcctcgaccgattagccggctttccagttctccaaggtccggcggtgaaagaaagataaagataccatcctctttcatctgcttcctaacctttaaggcaccctggacctcaatctccaaaaaaacatcccggccggaatcaagagtttcttggacgtattgtaaaggtgtaccgtaataattgccaacgtattcagcatactctaggagaccattattttcaatcaggtcttcaaattcttcccgagtccgaaaataatagtccactccttctttttccccagccctctgtttccgggtggtcatcgaaatggagtaatcaaaatcattattgtaatgctcgaataagtgcttccttaccgtacccttgccaacgcctgagggaccggataggacaatgagtaaacctctttccacagtacatttcctttcacaatacaaactacttattgacaagtgtaacataaatttaggattcttgtattagatttctttcattttccattagttcataaataaagacagcaagggcaaaactagtcgggtctacttggaaaaacaggcggttggccaggctgtctaaggcccaatccccttgcttaaattgctcaaccaaggtcaaaatccggtcttggtctggcaagggagccaggcgttggtaaaaataagtcagccactcttggtagctcaattggtagtttggcatgtagatttggcttatattatccttgtccatttgttggacttgcttaattcggctgaccaatacttggataaagcctttgactgtataaaccggctctggaggtagagagaatagtttaccgcaaacttctagtagggctaggtggtaattgttccttcctatcttccaatcccacttggactcaacttgtttttggatttttcgagcattttttaggatagctaggaggagttgggcccggcttccctcctgctttctggcagcgactagtatattaaccaagttttgcttgaggaagatcccctggtcgtaaaaactgtaataatagccgtagtaatgaccacaagccttcataaaatcattatagcctagtctaatattgcgttggctccgcctccagtcaaaaatcaacatatctcctaatggccaggtcggtctgacaaggaggacattgtctagcctaccctctaattccgctttcttttctggaaagatgtcgacaacgacaataatgtcagggtcttgactctgggctagggaaaggggaatatggttgcggtaccccccgtcaatatagtcttcctgtccaattctagttttttccaggaggggaaagagggaggccgaagccatcaggaggtcgcaaatttcctggcgcggtcggttattcacaaagtattcttctctttcttttgtctcatcattggtcaccaccaaaccaaattgaaccggcaattggtccagttggtcttggtccatcaggtaattgtcaatcaagcgacgcaaaggaccggtcttgattcctccttggctgaaggccttgaccgctagggaaattaagttcctggtataatctgtaaagtcctctgaacttttagggtcatagtcaataacgtctggtgtggaaatggtcgaccacatcttctccgcttggtcgaaataatcttgcatgacaaaggccccgtttaaagccccaactgatattccagtcaccaagtcaattgataagccaagcttgcgcatggccttccaaacgcctatttggtaggctccccgacttccgccacctgctaaaactaaggctagttttttgccttcttccttctttttatccataacctagcctcctccactctctatcagcttggttacccttattataacacctttaaactttagaccggacttatatggatggtcaaataaggtctaccgttggaaggctaagtgctttatctacttctctggtaagataatctgactcacttatttttagcctttgcaatctttcgactatctaactgacctgaatattaaaaaaagaccttgtttgacaaggtcttttataatggaaatcattattctttttcctcagcttcttggtcttcttcggcttggcccatatccttaattttcattaagcgggtaatttcagcccgttcactttcatccagcttcatctgaataaagtaaatagtattttctaactgagggatggtcaagtgttccaaggcattaacccgacgtcgcgttttttcgatttcacttgccatcagttggcaagttttttcgatttcagctaggtccagcatcttggacatgacgttattgaactgttcaaaggtagcatccaattcactgttggagttgagataaccatacttgagtggctcgtcttcttgagatttattatggtagtcaaagttcatttgcggaacttgaactgacataatattttttcggttaatgttcatctccaccgaccgtgaaggaatggccataatttcttccaagtaattttcatgcaagagtgacttagcgacagagaaggatttcatcccttcttccagatcgtcttctacttccttgcgcaattggtcgttttttcgaacgagctcaatgaattgccgcatgagttcatcttgcttgtctttgaggagtttataaccccgactagctagctcaagccggtctttcaagttggacaattccatccgggtggggttgacattcagtaaatcagccatctagtctcacccttcttccttaggcaagtacttgtctagtaagtcatctttaatccgtttcaattcttcacgaggcaagattttgagcaagtcccagcctaagtctaaggattcttcgatggcccggtcagtatagttcccttggttgacatactcttgttcaaagcggtcagtaaattcaacatatttcttgtctgattctgacaaggctgagtcacccaagacattggccaactccttagcatctttcccttgtgcgtaggcagagaagatttggttcatggttggggcatggtcttctcttgtcttgccttcaccaatcccctcatctttcaaccgagacaaggaagggaggacgtcaatcggaggctcaattccttggttttctagctcacgagagaggataatttgcccctcggtaatataaccggtcaagtcagggatagggtgggtaatatcctcttcaggcatggtcaagacagggatttgagtgacagaccccttagctccttccaaacgacctgcccgttcatatagggaagccaagttggtgtagaggtagcctgggtaaccacgacggccagggacctcacgtctagcggctgaaacctcacgcaaggcgttggcatagttggtcatgtctgttgtaatgattaaaacgtgcatgtccttttcaaaggccaagtattccgctgcagttaaggccatccgaggggtcgcaatccgttcaattgccgggtcatcggctaggttaatgaaaacaacagaccggtcgatcgcccctgtttctctgaagtcattcataaagaattcagcttcttcataagtgatcccaacggccgcaaagacaaccgcgaactcttcatccgttcccacaacctgagcttggcgggcaatttgggccgctaactcttcgtgagggagtccggatgcagagaaaaccggtaatttttggcctcgaaccagggtgtttaggtggtcgatggttgagatacctgtttggataaattcatcaggatagttacgggctactgggttgatggcctggccgttaatatccatggatttttctgggattaattctggtcccccatcattaatttggcccatgccatcaaaaatccggccaatcatatcttcggaaacatccagggacaagggcttgcctaaaaagcggaccttggtttctggtaggttaatccctgaagagccctcaaaaatttgaacgactgcccggtcaccatctatctccaggacttggccccgtcgtctggacccatcttggagctcgatatctaccagctcatcaaatttaactccctcaacgccttcaactgtcatcaagggaccaacaacatctgagactgttttatactctttaagcattggagtcaacaccacctttttcaacaagtgatttcataacatcttccaaagaattgtggatttcgtcaaagctgtccatatcgtcagcttcaatatatttcatccgaccaattttttctctgacttcaccagtccccttggctatttcatcatagtaagaacctacgtcaagcgcttctcttgcctggctttcgaagtccatgataatctgcatcatttttaattgcttggatagcggagtgtaagcatccacatcatcataagcgttttgttggaggtagtcttcacgaatcatggaagctacaagcatggtgattcggtcagattcggatagggaatccaccccaaccaaacggacaatttcttctaattcagactcttcttgtaaaatgacccgggcacgtttgacaatgtcattccagtctaagtcattgtcttccccgatatatttgttcaagcggtcagaatacaaggagtaggaatctagccagttgatggcagggaagtgccgtctttgagatagggaagagtcaagcgcccaatagaccttcgccacacgaagagtgttttgggtaaccggttcagaagtatccccacctggaggcgaaacggctccaatggctgtaatgctaccgcgacgttcttcatcactgccaagaggttggaccatacccgcccgttcatagtactcagcaattcgggatccaaggtaggcagggtacccttcatccccaggcatctcttccaaacgaccggacatctcacgcaaggcttcggcccaacgagaggtggagtcagccatgacagccacggagtagcccatgtcccggtaatattcagcaatggtaataccagtgtaaatagatgcttcccgggctgccactggcatgttagaggtgttggcgatcaagatggttcgctccataatagacttaccagtttctgggtcagtcaattcagggaactcgttaataacctcggtcatctcgttacctcgttcaccacaaccaatgtagacaactaagtcgacgtcggcgaatttagcaatttggtgttggacaaccgttttaccagcaccgaaaggacctggaacggttgccgccccaccttttgctactgggaacaaggtgtcaataactctttggccagtaattaaaggttgaatcgggtttaatttctgagccactggacggccttgacgaacaggccatttttgaatcatattgaaggttttttcgccatcctctgtttcaatggtgtacaagtcgtcttcaattgtatattcaccagactcgaccgagctcactttgccattgatgccatgtgggaccaaaatccggtgttcaataacagcagattcttggacaaccccaataatgtcgccagtttcgacttggtcccctggctggaccttggcttcaaattcccattttttatcgcggtctaaggcttgcacctctaccccgcgttgtaggaaactactttctgttttttcaacgaatgattttaagggacgttgaatcccatcaaacatttgcgaaatcatgcccggtgctaattcaactgacaagggttcaccagtgatgacaacatcttctccaggtccaaccatggaagtttcttcatatacctggatggaagcgacgtcgcctctcatgtcaattacctcgccgatcaatccgaattcaccgacacggcaaatatcttgaatatctgcttcttccattcctttagctgttactaaaggacctgagacactaacaatcgtacctttactcaaatccatcaccctcctaaagtatgttttgacccacagctttttcgacgttcttctcgatccgtgatctccctataccctgtgagccattgtggttcgggattaaaataacagccggtgtcatcattgtgtcataacgatcgatcgcttcagggatttcttgggccaattcttcggttaaaaaaatcacaccgaaatcttctttagccatttcatcaattgtttttttggctgtttgaccatcattaacgaatctgacatcaaagcctaacatcttaaagccaaggattgagtctttatcgccaactactccaattttactggccataattcagtctcatcctttctctaattgtatcggcatcaataccgttttctttaccagctaagacaagccgcaagttagtaacctctacctctttagcatggatataagcaatagttggtaagggaccaaaggcttgtaacttagcctctctcattttcttcatataagcatcgtctgtcaattgatctaccttgatagcagatacttcattgttatctgagtcagtagctgattcaaccagggaccggtaagaactggtccgcaagtagcgttctagctctgacaggcctaaaccagcactggatactaatttttccttatccaagtagccaacttccgttaaaataccatctataaaattacggttgtggccttgtttgctggcacggatggctgttgaaatattgaaataatcagcttcttgcttaaccaaatttatgatatcttcaattcccaggcggtcagccaagctttttaagtggtcaaagtaatggcggtctaaaattacatcaatagcataagcttgcttgctttcctcaagttgggctttgacctctgaaatactctgcaagtattcttcaggtaggagatctgattgctcttccttgatggcccgtcgcaagctttggatactaaagcgaccaatattgatatagaggtctgaaaagtcttgatcagcaaattcttctttaaataatacttttaaattatgataggtgtatcttaaagctgcatattcaaccaattctggattgggggttgaagtgaacatctcttggtagacccgctctaattcatgggtcagcatcaagtcgtagtcccgactttcttttatatcgtccacgtcattccggtaaaccgtctcacgcaagatattcaccgcatcatcataagattctgccgcaatcatccggtcaaaatggccttgcttaaggagtttgttttcttgagcacgtatggtgacgttcaatgatccataatcattgtctttcatgtcctctcctccttaagaaaatagttcttggttaatttgtctgacaaagtcatctcttcggttagcaatcaattcgctaaacaagtagttgaattcaatcccctttttagaaagggtaaaaccagactcacccttgatggtggtctcagccaaggtcacatttagtccttgaatgtccaagtttgaaagccatgcttggtccactaagccttgagacttgtcgcctaggtagagcttcacatccccttcttgactaaagttactcaaaaccccttgggcaaacttttggaaatcttctgaactcaagtcgtccaacttatcttgaacgctagctaagacttgtttgatatagtcttgcttgatttttaacttctcgtttcgttccttgatcgcaatggaattgacctcaatgtcatattggttggaggcttcttggtcaaggcgttccaattgtctttccttgtcttgagccgctttttccttggcagcttgaatttcttcatctgcagcttgcttcgcttcttcaaccttgctatctaaagattttttttctttgtcgataacctgctgggtaatctgctttaagtcagccattgtcatcctcctttatcatgactatcaatcaggcttttaagcaaatagaatcatgaataatgcgataaggaagcctaaaatagcgtaggtttcaaccatagcagagtagatagcagtttggatgttgacttcttctctttgggcaatggtttggataccagaaacggaaactctaccttgggctggaccagatgtaataccagcaatcccaacggttaaaccagacataaggtagtaccaacccattgatgggtccatacctgcttcaatgtttaacaagataaagaaaccaacaacgaatccataaatcccttgggtggaagggagagcttgtaagatcaaggcttttgcgaaaagttctgggttatctttcaagagggcggaagccgcttcacctgcaacaccaacccctctagcagacccggtacctgagaggacaacagctagggcaatacccaaacctgccatgaccatacctgtgttttcaccaaatagctctaaaatactaatatccattatttttcctcctattttttatggttattttttaatccaaatatatttttgtaaggttcctagaggctctaacttacgtcccccgccagtatagaacttgccaaacatttcaacgaagtggagtctgagggagtggacgtatgccccaaggaaggcaataaagatgtttaagaagtgtagggcaataaagacgatgataccgagtgtgaaccggacgactggtgggaagacactaaccagtaagttaaaggccatcccaatgttagccgatgccacacccaaggccatgatacgggaataactgactatgtcccctgtaatccctgctacatcggttaaaccgagcaagccttggccgaagccaacgaagatattgctaccggttatcatagaggctataacaatgccgattgcgttgatgacaatgagggcaatgccgatgttttccacgatagaaggcaagcctaacattaaacctgctgcaaagacgacagctccaattatgatcatggaccaggagtggtcatcgatataagcttggaggtggtcgccatccttgtgtttaaagtaggcatccaactggaaaccaaggataatatggatgacacccaggataatcgaaataattaagacagtgataacatcatcttgaaggtttaagacttggaaaggcaattcaaatccgaagaaggatccaaatattaaacctaaaataatggtggccactgtgttatacataaagaaccgaatattttgttcttggtcagggcctaaatccataatcttcaagcctgcaaatgtcaccaagaataagagcaaaccataacccgcatcagctgacatcatgccaaagaagatgaagtaaaatggtgcaatccaaggcgttgggtcaagacccccgtatttggggtagctaaacatctcaatcagcatttcaaatggcttgactaggccattatttttcagaacaacagggacatcatcgtattcttcttccatgacatcctcgggtatcacagccacattatcctctaagtcctggttgagttggtcggttacgagatcaacctggtcagcttcaatccaaccgcttgccaaaaagaggtgctggctatttaagaccaggtctttggccttaatccgttgtcccttattataaaggaattcaatagctaattctaaagaccgtttttcgtccttccaagttctcaagtcttttttaatggccttacgttcctcaacaagttgaacccgcttgtcttggttgtccttcagttcttcctcgggtaacttgtcgtatttataatttaattctctgaaaccagattgggctagttcactccggactgacttggcctggtctttgggtgtaatgacatacaagccaagactttccttgctagagtatacttcctgccaagtggtatcatctaggtcttcaacagcttctttaaagggcttaatatagtcctcatccaccgaacctaagatcacttctaggaggtcaaattccttcaattccttggggtggtggctgagtttcttccatcttctaaagaaggcttcttcctctcgcaaggctttgaggtcttcttccactttatttaattgatcttctttttcagatacccggtctatgatggcttggatctcatccaagtcaacttgatcttgcaagtccttcaaggtcaagacttcccttttagctttcagactggcaattaaacccggtttgggaacaaattgactgaggtagtctaaagcatattctgcatcttgaaaaaattggtcattgtccgattgttcgtccctagagctagtgacttcaaaatcatcgacaatggattcttcaaccaccttaggcaaaggaatcacttcaacactttgcaactgttgaatggattgcaaaagctggtctttgttttcttgttccgcaagaagggtcaattttttcattttagaaattgccatatgctttgagcacctcctctgttaattcttgtgacaattggtcgaccttgtcttcataactagaccgaaagctttctttcgcctggtctatatttttttgggattggtcgcgcttgtcatccaaacgcttgctatcctggtctttacgttctgaccgataatcctccaattcttgatccaaatctttttgaatacggtcaagttccttgtccttttcttgatttatttctttaatagactggtcactttcctgacgcaggtctttggcacgtttttcaacatccttaacctgatcaattgcatcttggttcactactagccccccctttcgattatgactactttatcaaatcgacatttagaagctaaaatatccatcagatatagtcttcacttataagttaattttatcaatctgacagtatttgtcaattatattgtgacgaccaagaccgaatcaggtttactagttcaatttttaacaagatattttttattgacacgggaacgaaagttcggtaaactatctttgcaaacatttgttcggggaggaagaaatatggaaaagccaatcgatagaagttacggaccaagtaacttatctaagctaaaagatcgtctcatgaaccagtcagaatttatgtcctttgatattaaaccgcaaatgcctaagaagcaagtttcccactttgtcaagcaagctgtccgccagggtcgtttggttgctatccaaatcaaccaaggagacggcattatcagtgaacttgtcggcactcctagcaggtctaaacagtcccaccacctggtcataaagggacgaaaacataagaccctctacctaatctcaggcagtcaaatccgtcatatccgctacctataaggcaagctacaagacatgttttgctataaaaaagaggctagaaaaactagcccctaggaaaaaaccggcgattttccatgaaatcgccggtttttgattgtggaattgaactttttcctagccctacttttagttaattggtcttccctttaactgggtcaaggtaacgttcaatcaagccaaagacaacgtccatgataacggccattaaggcaataggaatagctcctgctagaatgatggctgccccatcagttgcattgacacctcgctggataatgtcgcctaaaccaccagcaccgataaaggtcccaatggcggcaatcccaatcccaacaacgagggcattacggacgcctgccataataacggaaagtgccaagggaagttcaaccttgtaggtttgttgccaacgggtcatccccattcctttcgctgagtccatcacggcccggtctacatttctaaccccggcataagtgtttttcaaaatgggaaggagagagtagacaaaaactgttgcaataacagtgttgggtcccaaacccattgccagcataaagagggacaatatagcaatagaaggaatggtttggatcaagttggcaatggtaatcacccaatcagccaacttggactttctggcaatgtaaaagcctaagggaatggcaataacagctgccagtaagacgccataaatagagattaaaaagtgtctagcaaattggtcccaaacataggctccattttgctgaaaatagtagaagaactgttggaagaccgacatgttggcaacatcttccaaaccttcaaagttttgaatgattgtgtccatcttactcgcctccttggggttctaggtaaggttcagcatcttcaaaataattgtgctcttgtaagaaggtttgggctacaatagcaggctcaatcaacatgtcgtcagcaatatagttcatctcctgcatctgctcgggtgagattttttcttccaacttgagcatgatttcattgagctcaggatagtcttccaagaggtcttggttgacagctggactggcatcataaggtgggaagaagttcaagtcatcttctaaaaccaccaagtcatagctggcaatccggccgtctgtagaataaccgaggacaatatccatctctccggtttcaacggcgtcatagaccaaaccaatctgcatggggtaaacagtcccgaagtcaaagccgtattcttcaacaaagtcatcatagccgtccccttcccgggctagccaagaagagtcaacacctgctgttaattcgtcagcataaggaccgacatcagaaattttttcaaaaccgtattcatccgcaacatcctgggtcaccatgaaggcataggtgttagcaaaaccataagttggataccattccatatcaaattcttggtcaaagccttccaccacaacttcaagggccttgtccggttcggtaatggggtcttggttcatttccccggttaaggaggtcccggtatattttgcagcccctacattagcatcccctaacaacatagcttggtggaccatggttgatgagcctaggttgatgatggtttcaacgtcggtgtcaatatagtgttcaatcatgtcttccagtaaataagttaggatcgttgcttcagttgaagcctggccagcaacccggatggtattttcatcttctgcttcaacattacccaggccgggaaaagtgcaagctgaaagtaccagggctgatagacctaaactagctgttttgatcatctttttaaaattcatcctgacatccttcctatcttaagttcaccggtgtaacgcgtttttccaataagcttaggagaaaatcaacgagtaaggccaagatggtaactggcacaatacccgcaataattaattcaggtacgtatagactgagtccaccgaaaatatagtcaccaaggccacctgccccaatataggatgccaaagtggtccaagcaatgacgtaagtagtggacaagcggatactagccataataacgggggccgcttgaggaagttggaccttggtcaaaatttggccatttttcatccccattccccgggctgcatccactaagttgtcatcgactgacttaatcccggtataggtattgcggagaattggcaatagggagtagatgaagagggctaaaatagctggtacttgaccaacccctacaaaacgatcatcaaggcaagcaaggccaaggaaggtagggattgtaagattgaggctatggtaatcaccgcattagctgcccggtcattcaccctggttaggaaaatgccaagcgggacagcaacgataatccctaaaaggacagaaatgactgataaataaatgtgctcccaaattaagcgaagcatggtcggcccattttgggcgaaaaactcttgtatagctgaaagcatcgtatcccctctcctatgcttgttctagtttggctgcattgtagtcttgaagtccgtccttgccttggtctttcggactctctccgccccaaatagaatggtagacgacttcaaccaggtcagtgtgggttaagtagccttgcagagagtaatcatcttctaagacaagttcgaacttgccaccacgtttgagcattttttctgcaatttctctaatataagagttaggcttgatataggttttaggcagttccataacgtcatcaaccaacttgtctttattagcttggttgattttctctaagtacaagacaccgtaaacaatattgttgtcatcggttacaatcaggttggttaatcgtttatcccgcatcacagcgacagcatctgagatggaagtccccaattgaacagtcactgggtctgtcgacatgacatcagctaccagttggtcatttccagccttgctgagccggtcttccccaatcaattctttgacaaagtcattggcagggttggccacaatattgtggggggtatcatattggattaacttcccttctgacataattgccaccttgtctgctaagtccaaggcttcgtccatatcgtgggtgacaaagataacagttcggtcataatccttttgcagttgaatgactaaatcttgcaaagcctccctcgtgatcgggtccaaggctccgaaaggctcgtccattaagatgatttcttggtcagctgctaaggcccggatgactccaacccgctgctgctgtccaccagataattcagaaggatagcggtctaagtagtcgtctgggttcatatcgacagcttctagtagctctcttgccttgtcttgcatgtctttctcgtcccattttaaaagcttaggaactaagacaatattttcatagacggtcatgtggggcattaaaccggtttgttgaatcacataaccaattcctcttctaaggtcaactggatctttgtctttgatgttttcaccatcaatcaagacatcgccttcagttgggtcgatcatccggttgaccatccgcatgctagtcgttttcccactaccggatgtaccaataaagacaactagttcacccgattcaatggtaagattcaaattatcaacagcccgggtcccatcgccgtagactttactgatatttttgaactcgatcattttgccactcctccattaaagtctagtaaaatattttaatgtaatgttcacatcgttacatttcaacaacactataattattacaaatattaggggaacaatcaacttttaagagcctaaatagggacataatgggaaaatgtaatattaaaaatatttcctgccactaatgccctttcattatttttcctatactagctttattttgtaaaaaattgacctagtaaagagccccatggagggaatgtccatggggctctttagttttttcaattttcattagaaattttaattatttagaaaaaagttctcttaactagttgtcataccaacgtctttggttgacctccattataacggggaggataatagggttccgtttggtttgcttgaagaggtagtcgctcaggtcatctcggatgtctgatttgatggaagaccagtcaaaatcattgtctttgaggttctttttgacaacctttttgacgatagcattggcttcgttaataagatcatagttttctttaacgaagataaagccccgggtcacaatatgggggtcggccacaattttttgtttcttccggtcaatggtaaccacggcaaccaagatcccatcatccgacaagagtcggcggtcacgtaggacaatattgccgacatcgccaatcccgatcccatctaccagggtatcgtcagctggcacctctccagttgatgacattttacctttatggtattcaaggacttccccattactcaagaggaagatgtggctataattgatgccggcttcatgggccaagtcagcatgggctgccaacatccggtattcgccctggaccgggataaagaatcgagggtttaagaggttgatcatcagctgtaagtcttctggggtagcatggcctgacgccttgattttatctgaaattttctccaccctggccccagcccggtaaattaaattttctgtttcggccacggtaacttccatggcaatagaagggctggtagcaatatagaccaggtcatcttctttgaggttaacgtgctggtgttgtttggtagccatccgtctgagggtcttaataggctccccactagaaccagtctctaagacgacaatctgatcgtctctgtacttgtcaatctctgaaattggcttgattaagttcttttcgggtaggaaaagttttttcaatttgacggctgtatctaaaatgtcagttaactggttgccagtgacaaagattttccggttggttaaactagtggcattgaggatttgctggattcgtaagatattacttttcaccgctgcaacaataatccggccatcggtttggatgaaggactcattgaccactttttgaacccgtttgtccgacacattctcttcttgactttcggcttcaattgaggaacttaagagggtaaagaccccttccttgccgatatcagaaatccggttaaagtccgttttatagggcccatgggcactctggtcaaacttaaagttacctgtgtagacaatattaccttcatcagtccggatagagatccccattgattctggaatggtgtgggtcacttggaaaaagttaatcaagatcccgtcaaaatcaatttctgtatcctgacccaccacatggaagtcatcaaaattgctgttgccatggttttggttttgcaacttagccaattcaatggtcaattcagagccaaaaacagggaggtcaaactcatccaagaggtaaggcaaaccaccgatggcatcctcgtggccgtgagataaaaagaccccggcaatccggtctgcattttcccttaaataagtaaagtctgggatgacagcatcaataccaaacaattcattttccgggtacatgaggccgacgtccaggataaatatctggtcttctacttcaacaatatacatactcttactgttttctctgatcccgcctaaggggatgattttaattttcgacaaatctctcacctttatgtttttattttttcagttctaaaagctaatagctattatagcataagtcttggagcatgactaatggctgggactagaatattgtagactagtcattaatcttgtatactacaaacaaaaaggaggagcaaaatggaccagcaaacacttatctaccggctcaaccaggcctttcctgagggcttgaccatccaggaactcgttcaaacaagctctaattccccaagtcaaattcaagaccttatcctagaggccaaaaaccttggcttcccccttgtgacaggagataagcaagtattcctagcccaccccctctactctcaagctggaattgaagcacatttttcgccggacttttccttgcctatccagttagaagaagtaaccgactccaccaacaccttggcccgtcaggcagcaaaccacgttcaggaggcaaccgcctttatggcctacagtcaaagagcgggtgtcggccggctcaaccgtccttggcagtcccccatgggtaaaagtttgtccttatccttactcctgccagacttccccaaagacctacctgtttatcttctaagccaaattacagctgcttctctttgccagtccttagacccctaccttgacaacttaggcattaaatggcccaatgaccttattgcaaaccagcgaaaaatcgctggcattctccctatttttgaccaggatgaaacaggtcgttcctatgtcatcttaggcattggtctcaacctcttccaagacctggaagatttccctaaagacctccaagacaaggctggttcccttaaaatggctgtcggctttgagatagatatcgaccagctcttagctaagctgatcgaggatttagttcgggcaatccaggcctttaaagacaggcaagatggtcaagcctttctagctatttgtcgggagaaatcccttttaatcggcaaggaagtcctaagctatgaaggagataagccggcccgtcaggttaaagtgctagatattgcatccaatggcggcctaaaagtcaaggacttaaaaagcgggcaagaagaagtcctcttgtctagtgagatttccatccgggcacaagatggccactatctctagcccagtcctatcaaagttagcttaggaaggaatacctaaccggatcgaaatcttccttgcattttaaccaagcaagtgacctatccagttgatatttacacaattttaatctttcatttctactttttacctctttgaagaagaaccaactaaaatcaatcttcaaggaggtttttcaattaattaaaattaatatttttcttgcaatcctaagtaagaccaggtagactctaattaattatgggttaaaattttcctttataacaagagaataatacatacttttcatcctatccgccagctttgtcgccaccccattggatctaccctcttgtcaaacctgccctaaaggagtgagctgctatgttagaagaccaacgcaaggaaatcgaccggattgaccaggaaattgtcaggctattcgaattacggtgccaagctatcgaagccattgccgaactcaagcttaaaaacaagatcgctgtcctggaccaagaccgggaaaagcaagtgatcgcaaaggtccaatcctacctgagtgatgacagccttaaggaagagattgcagacttataccaaaacctaatgcggatctcccgtctccaccagactaaatggataaaaaagcgggaaaagtcacaagaatcttaacttgaaaaagcttgactaggactcctagccaagctttttgcttttttcagattggttttattttatgactctttttcgagtttatgaagggcctgtttacgggataagttgaccctgcccttgctgtctatttcagtcactaggacttccagctcttctcctaacttaacaacatcgtcgacatttctcacaaaaccgtctgctagttctgagatgtggactaagccatcagttcccttgataatttcaacaaaggccccgaatttttcaattcggacaaccttacccttgtagattttgccgacttccacttcttcagtcaattcttcaatgatttcaatagctcggtcaatcatggcctggtcttgaccataaacggaaacatttccgtcatcgtcgatatcaattttgacaccagtttcatcaatgatttcgttaatttggtccccacccttaccgatgacaattttaatttgctcgggcttaattttaatcgacttgattttaggcgcataagggctgagttctgggcgaggctgggcgattgctttttccatattatctaaaacggacatgcgtgcctctttagcagaagccaaggcctcttttaaaatcgcctcggtgatcccttcaattttaatgtccatctgtaaggctgtaataccttgccgggtcccagctaccttaaagtccatgtctcctaggtggtcttccaaaccttggatgtctgttaagacagtatattcttcagggctattcataacaagccccatggcaatcccacctactggcgccttaatgggaaccccaccgtccatcagggcaagggagccggcacagatggaagcttgggaagaagatccattggattcaaggacttctgctaccagtcgaatagtgtaagggaaatcttcctggcttgggatgatgggttctaaagctcgctcacccaaggcaccgtggccaatttcccgccggcctggtgacttcggccgaccggtctccccgactgaataacttgggaagttatagtggtggataaagcgtttttcttcttctgaactcaagccgtcaatcacttggtgttcatttaatgggcctagggttaaggcggacaaggcctgggtttgtcctcttgtaaagagaccggatccatgaacccgggcaaagaggcccacttctgattctaggtcacggatttcatcaactttccggccgtctggtctcactttttcttcagtgatcaagcgtctaacttcttctttttccaggtcgtcagctatttctttgacatcagaggctaagtcggccaagaattcctcgtcttggtcctggtatttttcctcgtagtaagccaaaatggcctctttaacggcctcaatcttggcaccccgctcttgtttgtccttggtctggatggcctgggtcatttggtcgttaaactggtctttcacttcagctaccaattcgggatccggcaagaccaggtcatagtccattttttcttggccaatttcagcgataatctcttcttggaaaagacacaagtcttggatggcttggtggccaaacaagagggcctctagcatatcttcttcagaaacctggtcagctccagattccaccatattgatggcttccttggttcctgccacagttaagtggatgtcagaagctgcatcctcttcttcagtcggattgatgatcaatttcccatcaacccgaccgacattaacacccgctatggggccattaaaaggcaggctagaaatggaaagggctagagaagagccaaacatggcggccatttcaggcgaacagtcagggtcaacggacatcaccgtgttataaatttgtacttcatactgaaagccttctgggaagagaggacgaataggacggtcaattaagcgggcagttagagtggcgtgttctgaagggcgtccttcgcgtttaataaagccaccaggtattttaccgactgagtacatcttctcttcataattcaccatgaggggaaagaagggcatggtgctcggctcatcgccgttgactactgctgtcaagacagcagtgttgtcataccggattaaaactgctgcattagcctgcttggcaagctggcccacttcgacttggagggttcgtccagcaaattctttggtaaatacttttttggtcatggtctactccctttctgaacattacccgctactctacaaatatcaatattctcgcctgaatactcatatttgtatagtagcttgtgtaatgctgtcttgtttgcttaaaaaataagcgagattcacccgaaccccgcttatctttactttattttaacgacgtaatcctaaacgattaatcaattcacggtagcgtgtaatatctttatttcgcaagtatgctaacaaattacgacgacgaccgatcttcttcaataagcctcgttttgaatggaaatcttttttgtgcactttagagtgctcgtttaattccgtgatttcctcagttaaaacggcaatttggacttctggagacccagtgtctccttcgtgaagtgcatattccttaatgatttcgttctttcttgcctgagaaactgccataagttccacctctttctcttcattgaatccattcactgagatggcgttggtgaatcgcccatccaagcgaaggtctgtgcttacttggcttgttcaacacggtaaatatcatactatactgaatggttaaaatcaagcttttgcccttagcactttgcctagagacttaagctttaaacttactcttaatttccatgacaacatcccttaaattagctgctttctcaaattcaaggttcttagctgcttcttgcatttcatattccatactgtcgatcatgtcccgtctttcatctacggacaattttttgattttttcttcggtcaaaccttggccatcgtcgtcttccaccttagcaatactgatgaggtcagggacttctttgcggatggtttggggagtaatgccgtggtcttcgttaaattgctgttggatggcccgtcttctttccgtttcatcgattgtagttttcatggaatccgtcatatggtcggcatacatgatgaccttaccactggcattccgggctgcccggcctgctgtttggatcaaagaccgggtgcctcgtaagaaaccttccttgtccgcatccaaaatggcgactaaggaaacttccggcacatccaacccttctcgtagcaagttaatcccgatcaagacatcaaagtcaccacggcggaggtcccggatgatttcagtccgctccaaggttttgatatcactgtggaggtagcggaccttgatccccacttctttcaagtagtcggtcaagtcttctgccattttcttggttagggttgtgataaaagttctttcattcaagtcaatccgtttttgaatttcattaatgaggtcatcgatctgaccttcaatcggtcgcacttcaatctctgggtctaagaggccagttgggcgaatgatttgttccaccacttgagaagaccgatctaattcataatcggctggagtggctgaaatgtagcaaatttggggaacccggtcttcaaattcttccaagcgcaggggtcggttgtctaaggcagagggtaagcggaaaccgtagtccaccagcatttccttccgggccttgtccccattgtacatgccccgaatctggggcatggtcatgtgggactcatcgatgataaaaagcgaatcttctgggaaaaagtcaagcaaggtgtaagggggttctcccggctttctgccatccatgtgaagggagtagttttcaatacctgaacaatagcccatttccttgagcatttcaatatcgtattccgttctttgctctagtctttgggcttctaacagtttattttcatcattcagtttgctcaattgttctttgagttccacccggatggaatgaatagcttcttccgtttgctccttgcttgagacaaagtgggtggcagggaaaacagcaacgtgcttgagggattctcttacttcgcctgttacaacgtccacttcccggatcctgtcgatttcatccccaaaaaactcaacccggatggcctctgaactccgggaaaccaagaaaatctccacaatatcgccccggactcggaaccgtccccgttggaagtcaatgtcattccgttcgtattgcatgtcaaccaaacgggccagcaattcatcccggctcatttcagttccttctcttaaagaaaggacatggtcacggtagtcgagaggattgaccaaaccatagatacaagaaactgaggcaacaacaatggtgtcccgtcgctccagaatagaagaagtggcagagtgacgcaatttatcaatttcatcattaatggaagcatctttttcaataaaggtatccgttgaagggacataagcttcaggttgatagtagtcatagtaactaacaaagtactctactgcattattagggaataattccttgatttccgtgtagagttgtccggctagggtcttgttgtgagcaataaccaaggtgggcttggagacttcctggatgacattggagatagtgaaggtcttacctgtccctgtcccccctagtaggacttgttctttttggtggtttaagataccttgggcaatttttttaatagcttggggttggtcacctgcaggttggtattttgactgtaaatcaaaaactgaatctgggttggtcatggctaatctccttacttatctctctatatcggcttaattgaaccaactaggaccaaatgaccgaaagcgagcaagtggatcttcatacaaagccggaagggtggtcttcgcttggtcctctccttgtatagctaacaagggccaggtccgatccctgccctttcagattgatttcaagactaagtaaaagaaaaacctatattattagcttacccagcaagcaagttgactggctgggtagaccataatataggagactttatttagcctaattttttagctaaacgtgacttgtcacgggcagctttattcttatggatgtgcccttttgtcacagcccggtctatagcagaaactgcttgtcggtataggtcttgggcattgtcctcattattttgagctgcttttaagaatcgtttcttagcagttctcatcccggtaatttgacttttatgcagttgacgttttttctcatcttggcgaatacgtttaaaagtttgtggattatttgccatattgtaacactccttgtctaatctaactgagctggttgctagcttgctaactcaatcagtttacaaaaaatacaggtaaaaagcaagttaattcatgacagaatctttaaattgtagggcaaaaagttcaaattgcaattgcgaggtcaccttgcccgttttaatcaaatgatctgactcaattaagtagcggtaggcggtcgatagactttgcttggaaaaaatctcctgtttctctatggctagcttaacccggtaggggtgaacttttaagattttagcgatctctccttgttggtagcccttagtccgcaatattttaacctgcaataataaacggaattggttcatcataatggcgatgattttaattggctcttccttttgttgaattaagtcattaaaggcccgtatagcagcctggctttgcccgcttaaaatatagtcgttaatactaaagacattactttccaggcttggtgatacgacctggtcaactgactggacggtgatgattttgtcatctaaatggtacaagaataacttgtccaactcttgcatgacccgacttaagttggcattggttttttcaaccagggcctttaaagctcctttgtcaaactggtagcctcgagcctttacttttttctggaccatatcttttagatctctttggtctggggaactggcatctataatctcagcttcctgcaatagggctttggtgaccttcttccgcttgtccagtttctcatagggggcaaagaagacgagaacagtaaagtcggctgggttttggaggtaagccagcaagcgatccaagtcatggtccagatctgttttccgcttctcccctgttaggaaaaaggggtcttggatgtaaaccaggcgcttgtccccaaaaaagggataggattccgcatcagacaaggccatgtctaggctatcagccatcatattaaattgaccaaaattcatagaagcttcatcctggtccaaaagggcctggctcaaactttttttaacctggtctaacaagtactggtcatctccctggaccaggtagaggggagacaagtcttggtctttaatttttttgagttggtcttcaattttcatcagtcttcctcccttcttcttttattacttggtcatattttttaactagctgaatcaagcattctaggtcactgtaagtataaatcaaaccaccggcttggtcagtccgaaagacctgagtccccaccccctctaaacggtccaagacctcagaatggggatggccgtagggatttaagcgaccggcagaaatataagcccgcttaggccggtaatggtcgataaaggcctggcctgaggaagttttactcccatggtgggctagctttaagttatcaatttgtaagttgggataggaggccataatcgcttcctccccaccggcttcaatgtcccctgtaaaaagccaaccttcacccccaagcttgccatacaaaactagggaagcatcattgctgtcttctgttagctctttggggtgaagaacagccaaagtcaaggaatgatgacggtaaacttgaccagcctcaactaacttaaagtcgattccagcccgggcaaaagcctggatgatatctgactggtaagtcgtttggctgacccgaatttctgaaacagggaaatggtcaagtaaggcctgggtttcccccacatggtcataatcaccatgggtcaggtagagagcctctaaatggctgatgcccatggattttagagtgggaataatttcatcccgggctaaggaaaagtctctttctcgcttttgccagtcttctttttcctgccatttgaactgaccccctgtgtcaatcataattccggaagctgacattggaggtttgaccaagatcgcgtccccctggccaacatcaaagacataaacctgaccaagaggagagaattgctgactagacagacctaaaataaaaagtgtagccaaacccaataaggcccagattttcttcttcttggcttgcaagtataccaagaccaggtaaaaaatgacagctaagccgaggtagaccggccaagataggcgtcctggagtgatggtaaaagatccatagttatgaacccaggataataggtcttccatggactctaaaacaaaattggtgtaagtcataatccaggccccaaaaccagtctgatgcaggactaggcctaggaaaagacagactaagaccatgggaaaaataactagggagaagatagggacaaaaatgatatttaagaagtaagagatcaagggaaattcaaaatagtggtagctaacaaaaaggataacgaacatattcactaataagttaaggaccaaaagctggttgactggtttataggtctttaatagttgcctttcttcaattaaaagaagaaggccactgatcccataacttaattgaaagccaatcccgaaaataactaaggggttaagcaataaggctaagatcaaggttatggaccaggcatcacttttagctaaattgaccccctttaagcgaaaaataaagtacaaaaggtttgacacgactgcccgaaagacactcgtccccaagcctgcaagcaggctaaagaggggcaggacaaagataaggaaaatcaggcttcggtctcggctgacccggaaaaaggacaaaatttgagataaaatttgaaccaataagtctacatggagccctgaaatactgataatatggataataccgagttctttaaacaagttaacctggtctcttgccatggctttttgatggccaaatactaaggtttggatatagggcaaaacaggaccagtgaagactttctccagaccttgcaagaccttctgcctagcccggtctaagtaaagaaatagtggtaatctccctcctgggtcaggtatgggctggagtttttcagccttaaaaatataaaaaatcccttgtcgagccagataggactggtagttaaactggttaatattggtattgggttgggcttgttcaagcttaccttggatggtaaaggattgaatggcgtcaatctggaagctttctttttcggcttgactagcaaaaaggtggtggaccatcactttttcttggtagtcaggaaggtaggcttcaaaggttaacttgtctccgtcaagcctggttgtggtcggcaagcctagtccctgtgcctggtccaagtcagtagagaggctggactcatttttgatgaaattgtaacggaagactaaaagagcagacaaaagtaaggccaggcttaaaacttttttgtttttgaaagatagcagtcggcccaaccaaaaaattgtcacaagccaggctaggaagtggccagtccctagaagacaggccagggctaagaccataatggctagcagtaaccacttatacttcatgcaagtgcttattgcttagggctggtctggggtgaaggactgaatggctttaaaaacctggtcatccatctcaacttttttgagatgaatacctgcatggtcgattaattccatggcataaggatggttgtggtaatctttcaagtagtaaatttcttttataccggcctggattaagtgtttggtgcactgcaggcagggaaagtgggtcacgtagatagctgcaccatcagtagaagacccaaacttgctacactgtaagatggcattttcttcagcatggatagttctcaagcaatgaccatcttctatatagcaaccaacatcgatacagtggggttccccgctgaccgacccattgtaaccgccagaaataacccgcttgtctttgacaatagttgccccgacagccagcctttgacaggtagaccgcatggaaattaaaatactttgggccataaaatattggtcccaaggaatgcgtttggtcgtcatggcttgacctcctatctaatttattgcttcacaaagcttattttactacacttgtcttttagattgaaagattatccttaaggttttcaaatattttatccccgattccggagacattcttcagttcttcaattgttttaaaaccaccatggtcttcccggtattgaataatattatctgccttggttggcccgatactatttaattgcattaattcttccttactagcttcattaatattaacgactaggctctcacctccttcactagtcccagctggttgattggtcacttccgggtcatccggtccaccgatatagataaccatttcatcacggactttctgggcaaggttaaaggtcagagggttggcttcaggactgagtcccccagcaagttcaacaacatcctgaattctagaatctgccagaacttcataaacccccggataggtgacaaaacccttaatgtcaaccataatccatgtttctgtctcctctggcaatagctcatcctcttggcccatgtctaggaccacctcttcccctccctctactaaactagcaaaatccccttcctcttggtcctgacccttaacttggtttaaaagaaagaacaggaccaaaaaactaaggactaggacagctataataatttgccaatagtcttgccaaacctctttgactttttccatgctttcccctcctcttctgtcctagcttataatacgcaaaaaagtctggatttcatttttctttttaaaaaatatgcttcatttttaattcaaggccaaaaaccttccttagatacataccaaaaccccacaaaccgatccttgatcagtctatggggttccctaatatattttaaaattttgctttttattttttaaaatattcgacgacggggtcaggtactaggtcatcaagccggccattaaacttaataatttcccgaacaatagaggaagaaatggaccggtatttggaagacgagactaggtaaactgtttcaatagctgggtcttggaccttatttaagtcctcaatggcaatctcatattcaaagtctttaaccgaccgcaaccccctaaccagactactagctccttggtccttagcaaagtcaacaatcaagcctgactctaatgtcttggcttgaacattagctagaccctggctagcaattgattgttcaaccaggttcaatttttggtcaaagttcaacatactatttttcgatgtattattagcaactgcaacgatgacttcatcgaataagtggctggcccttttaatgatatccaggtggcccagggtaatcggatcaaaactgcctgcatagattgcgcgattcatttaagctttcctttcataaatggtgataagggtggtcccatactttctttgcttgtaaatagttaaatctcgaatggtctctggcatttgggagtcatacttggtctcacagacaatcaaggcaccaggcttaaccatttcttgcttgaccatttcctcgatatcgccaatgatttggtcgtcttggtagggagggtctaggaaaatgaggtcaaaggccaattgcttgtgcttaaaggtcattaaagccttggctgctggcgaacgatacggatagaacttgtcttcttccttggtaatggtgatatttttttggattgatttgactgccttagcgtcagcatcaaccaggtaggctttatccatgccacgagagactgcctcaatgccaagggccccggtccctgcatataggtctaagactaagcctccttcaaaataagggccgatcaggttaaaaactgattccttaatttggtcactggtcggccgggtctcatcacttacctcagacttgagtggccgtccaccatatttgccagcaataattcgcatacatccacctcaataatctaattgtgagaacaacttcagtccactttcttcttcattttttgccttggcctcttggtctagctcttccaacaagccactatagtcagctgtcaagtcctggtagtgacagtcttcgatacttctgacaaagtgcagtttaatgagttgggacttcaccttgtctagcttcttcttctccacatacaatagggcatacttcatcttcttggaaacatagtgcaaggttccatactgacttaattggtttaagtacttgggcgtgtacaaccacacaatgatgccctggcgctttctttctttattgtccatgtcgccaaactcctctctagcccacttctgatataataaaaagccctctaattcatgagggctttctaaacttgttcttactcgtcttggtcaacggcatggttgtagacatcatttaaatgtttttccaagtcagccatcatttggtgcccgtcttcttctgggagtagatccatttgaacggcgaattcaatttttttagaaaagccaaacaattgtgtatcgatcacttcttcaaatgctggacatgaaacacacaaatgacgctggttctcgattaatttggaaatgcggttggcatcttccattaaaatatcctttgtatattgcacttttacactatccacaccacatgccctccttttttactctttgaaatcattataccatatcgagtcctcgggacaagtctaacccttgcgcttgttcgctttttctcgagtatttttgtccaaaattttctttcggagtcggatggattctggggttacttccacatactcatcatcggtaataaattctaaagattcttctagggacataatcttcggtcgtttaatgacactagtttggtctttggtcgctgaccggacattggtcttttgtttttccttgatgatgttaacggtcaggtcattgtcccggttattcataccaacgatcatgccttcataaacttctgtacccggttcaacaaaaatggtcccccggtcttctaggttcataatactgtaagtggtcgctgtcccgttttccatggaaaccaaagccccgtttttacgttcgccagtattgccttcgaccattggggcatactcatcaaaactgtggtttaagatgccgtagccgtgagtcatggacataaattcattactaaagccaatcaaaccccgggccggcacttggaagacaatccggacttggccattgccagtgtggaccatgtctagcatctcgcccttgcgttgtccgagggcttcaatgatgttacccatatactcttcaggcgagtcaatttgaacccgttcaaagggttcacacttaaccccgtcaatttctttggtaatgacttcaggcttggagacctggagttcatagccttcccggcgcatattttcgattagaacggacaagtggagctctcctctgccagaaaccttccagacatccggtgaatcggttgggtctaccttcaaggagacatcggtttggagctgggtaaagagccgttcttcaattttagaggaggtcacccacttgccttcccgaccagcgaaaggggagttattggctaagaaggtcatctgcaaggtgggttcatcaatatgaaggactgggagggggtccacatggtcagttggagtaactgtttcgccaacgaagatatcttcaaagccagagacggcaatcaagtcgccggccttggcagactggatctcccgtctttccaagccaaagtagccaaaaagcttggtcacccggaagtttttgaccgatccatctaacttggacaagctaacattgtccccaacactgatggttccccggaaaacccggccgatcccaatccgaccaacatagtcattgtagtccaaaagagaaacctgaaattgcaagggttcatcactgttgtcgattggagcagggatcttgtcaagaatggtttgaaaaattggatccatggtctgctcttggtcgctagcttggtctgaaaaagaggaggttccatttaaggcagatgcataaaccactggaaattccagctggtcttcatctgcctccagttcaatcaagaggtctaagacttcatcaaccactttttccggttgggctgttggcttgtcaattttattgaccaccacaatgggttgtaggtcttgttccaaagcctttttcaagacaaaccgggtctggggcatggtcccttcataggcatctacaatcaatataaccccgtcgaccattttcataatccgttctacctcgccaccaaaatcggcgtggcctggggtatccaaaatattgatcaaggtgtccccgtactggaccgccgtattctttgctagaatggtaattccgcgttctttttcaatgtcatcggaatccatggcccgttcaccaatttcagtatggctatctagggtgtcggattgttccaagagttggttaaccagggtcgttttaccatggtcaacgtgggcaataatggctatatttctaatatcatctcgttttttcacacaatttcctccaacttatcttggcaatgtctttctactacttgttaacctgtcataaaacagcaagaatattatatcagttaggtcaaaggactgcaaaattatttttgatgcaagtggtccagtatttcttggtgagccagcttgttggcgatgataatctcactttccgttagaaaatctggatcttggccttggaagtcacttagcttgccccccatttcagccataaatacagctgctggagcataatcccatggcttcaagtgagaggcaatataggctaccgtccggctcatgagaacttccatggcctccatgccagctgacccatagagccttaagcctagggtctggtcgagcagaccttggagtttggtccgagaagagtcgatcaagatcttagaattaaaggccaaaagtccttggtccagtcttcggtctaaaagccctgtaataggattgtcattgcagtaggcaccctggcccttgatgacatgataaaagcggtcccccactaagtcatagatgtaagccaattgccccaccccgtcttcataaaaagctaacatgatgcagaaattttccctctgcttgacaaagtttaaagtcccgtcaatagggtcaacaaaccaaactggcccctttaagtcactcagcttgtcgccaaaaccttcctcacttacaatcctatggttggggaagtttgccctgatcttcccggtcaagaatttttcggtttggacatctaagttggtcaccaggtcattggggcccgttttcgtctccaccgacaaatcctggttcaattgactagcgatttgacttcctgcctctttgacccaagcagtcgccagatcatgtactttatttaaatttgtcacaattgaccacctctctagaaactctatacagcctatttactagcaattttaccacagctatcctttagaaaaaaacttgtcatctaaactcacatgaatgtaaaaaaaccactgggttaaacccagtggttttcgattcctatcttcagtcaaaacttagatgtggattgcttggtctagggctgcttcagcagtatccatgacagcttcaggaagggttgggtgggcgtgaacagtaagggtaatatcttctaagttcatgccagattcaattgccaaggcaatttccgcaatgatgtctgaagccccaacacttgctacttggccaccaacgatgacgttgtcttctttggtggtgatcaagcggatgaagccatcagtcgcattgagagatagggcacgaccgttcccaccgattgggaatttagttgctttaacgtctaggccagcatctttggcttcttgctcagagtaaccagcaatagcaacttcagggtctgtaaaggcaacagcaggcattgccttgtagtccacttcgacttttttgcctgagatagcttcagcagcaacttttgcttcataagaagccttgtgggcaagagcagcacctgccacaatgtccccaatagcccaaatggagtctacactagttcggccttgtttgtctactttgactaggttgcggtcgtccaattcaacgcctgcagcttctaagccaagttcatcagtgttaggggtacggccaactgtgacaagaacatagtcagcttcgatggttttttcttcgtctttggcttcgtaagtgactttgacacctgaatctgtttcttcagctgattttgctttagctttagtcacgacatcaacgcccttgtttttcttgaagtcgcgttcgacaattttaaccatgtctttgtcaaaaccgccaagaatggtgtctgcaccttctaagatagtcacttcagtaccaaagttggcataagcaccagctaattcacagccaatgtaacccccaccaacaactactagtttttctggaatttcttccaagtttaaagcaccagttgagtccaatacccggtcagatttgaagctgaaaccaggaatttcaattggggaagatcctgttgcgacaatcaagttgttgaagctgtaagattgtttaccatcttcagtcgaaacacttaacttgttagggccattgatataagcttcgcccatgatgatattgacaccatttttcttgagtaatccttcaacacccttggtcaagcgtttaacgactcggttgtctttccatttttgagtcttggtaaagtcaatctcaacgtctccagttgtaatacctaagtctttagaatcaaccgcatcgtggtatttgtggccagcattgatgagggctttagatgggatacatccgacgtttaagcacaccccgccaatgaattctcgctcgatgacagtaacatcttgaccttcttgggcagcccggatagctgcaacgtaaccgccgggtcctgacccgatgactactgtatccaattcttcagtaaagtctgcaacaaccattaatgaacaccttgtcctttccttttgtctggtctggatttacaaagacagctgtttggataacctgctaagccagctgacaagaccctatccttccatgagtaataggtcaggatcttcaatgacacgtttcaagtggtttagggctctttgtccatcagccccatcgatcacgcggtggtcaatgatcaatgacaattcttgaacaggggcaactgccaattcatcattttcatcgactaccggttttttcttaattcggccaattcctaagatagcagtttcggggtggttgatgactggtgtgaagaaaccaccgttaacggaaccaatgttggtaactgagattgagccaccggacatgtcatctgaacttaatttgccagccttagctttttcagatttctcctcaatttcgtcagcaatttcatacattgattttttatctgcatctcgaataaccggaacgaataatccacttggggtatcggtggctatacctatattataatagtttttgtgaataatttcatctgtagtgtcatctaaagatgtatttaatacgggatattttttcaaggttgataccaaggccttaacaatataaggcaagtaggtcaattttaccccttgttcggcagcctcttctttaaaccgactacggtgggcaatgagttttgtcgcatcggcttggtcaaagagggcgaaggatgggatggtattggaactgtaagacataccatttgcgattgcccggcgtgtcatggacattggttcgcgagtttcttggtcttcaaatggtgaagagtaagctttgacttcttggctaatggtttgcccttgacctgtttgatcttgggcttgtgggctagcagagccgtcaaagttgtctatatcttctcgagtgacccgtccacccttaccagttgcttggacttggctgatgtcgacgtctttgtctctagcatattgtcgaacagatggcatggctaggacttgcttgttagggtcagctttttcaactaccccaccactagcagcgggctgactggcttcttgatcttcctctttttcttggctgtcttggtctgcctggtcttgactgctttcttcttcctcatcgtcttctgacccatcgtcaattttaaggatagggtcaccaactccgactaaagttccagcttcaacgataaattcttggatagtcccgtcaactggtgatgccaactcttccactgacttatcgttttggacttcagctaccgagtcaccttcttcaacggtatcccctttttcgactaaccagctgacaatttcaccttcagccatcccttcgccgacgtcaggtagtttaaatgtgaatgccatatttgatcgctctccttttaaacgtgtgtgattggatgtggtctcaagcaaagagggaatggcccttgccaatgaggaaaccattccgactcactgcttgacataaatcatctaacttgcttagaagttaatggattctttcactgcttcaataatgtcatctgcaccaggcaaccattcattttcaatttcgccaaatgggaagacggtatctggggcagaaacatatttgaggggtgcttcaagtgataggattgaccgcaaggcaacttctgcgatcacttgaccgcccactcctgcttgtctttgggcttcttggacaaagacaaagtggttggttttttcaattgactcggtaatggtttcgtaatctaccggtgaaacagttcgcaagtcaatgacttcaaccgaaatatcttctttctctaattcttcagctgccttcaaggcttcgcggaccatgtatccatatgcggcaactgtcacatcgcttccttctttggctacattggccttgccaagttcgatttcatattgttcttccggcacttcttggcggaaagaccggtaaagtttcatgtgttcgaggaaaacaactgggtcagggtcgcgtaaggctgcggttagaaggccttttgcgtcataagggttggatggaataacgactttcaaaccaggagactgagccatcaagccttctagagagtccgcgtgcatttctggcgtgtggacacctccgccaaatggtgaacgaatggtgactgggaagttaatgtctccccccatacggtaacgttggcgggcaatttgaccagaaatttcatccatggtctcaaacacgaaaccaaagaattggatttccataactggtgtaaagccttgtagggctaaaccaaaagccatgccccctataccagattcagcaagaggagtatcgttaacccggtcttcaccatatttgtcaaagagtccttgagttgcccggaagaccccgccgtttttaccgacgtcttcaccaaagataatcatcttgtcattttgttccatctcttggtcaagggcttgggtaatcgccttgatcatggtcaattgattactagccatggttaattactctccttctcttggtattttttgatttgttctttgatattagcaggttggtgttcgtacatcgcttcaagtaagccagtaatcgtcatgtctggagttgaatcagattctttggctgcctgcttgatttcttctttggctttttcgacgacttcttcatgtttttcgtcgtcccataaacctttagcttctaaatatgctttgaagcgtttgattgggtcacggtcatcccaatagtcaaaagactcttggtcacggtagatggaagggtcgtcacctgaagtagagtgggcccccatacgggaagttagtgtttcaatcaagacgggaccattgccagctgctgcccattctcttgcttgtttagaaactgcataaacggcgagtgggtccattccgtcaacttgaacacccggaataccagcagctgctgctttttgggctagggtctcagcagcggtttgcttatgtcttggggttgaaatagcgtaaccattgttttgaatataaaagacagctggagccttgtagcgggaagcgaagttaatcgcttcgtaagtgtccccttgtgaagatccgccgtcaccggtgtaggcaaaggtgacaacattttcttcgccttttaacttgacaccaactgcgttccccatagcttgtaccatttgggcaccgattataatttggggtggcatagctcttaggtcatcataccggttcccttccatatggcctctagaccataaaaaggctttggaaataggtaagccgtggagaatcaattgtgggacatcccggtaaccaggaaaaagccagtcttgtttttcaaaagcatagtgggaagctacttgggaagcttcttggcccttacttggggcataaaagcctaggcgcccttgttttgacaaggcgatagaccggtcaaataaggttcttgaccagaccattttctccattaagtcaactaattggtcatctgacaagtctggcataatatcctcatttacaacttccccttccttatccaatatttgaacagttgggaaagttgccttgtaattatttaagattgcctcataatcaactggctgtgttgattctgagttcaaagattcaactgagctttcttgcacacgttgatcgctttgttctttcgccataaataatcccattcctctcattatggtaattgtaatacaggcttagtggctgttacacttcgtctgtcgatttaaatttagcatggaacgaaccatttttcaagctttttattataatcgatttcatcatgataattatacgacttgctttgactcactctgaaatgaaacctggctagtccgagcaagctttaagcctataacaccatttcaaaactgttataatttgcttcttatgcaatttctttataagccttatcctcaaacaagttaattgcttaatttttatcttattgctatactaaactattgattaggagtggtaaaatgatcacaatgaaagatattatccgggaaggtcaccccaccttacgaaaggttgctgaagaagttacctttcctctcgatgacgctagcaagcaaacggctcaagatatgttagaatttgtcaagaacagtcaagaccctgagcttgcggaaaaatacgatcttagacccggggttgggatagcagcccctcagatcgatatctccaagcgttttatcgctgtctacttgtctgaagaagaaaatgacggccaggaatttagccggattatgtttaaccctaaaattattagccattctgctggcaagacggccctaccaactggtgaaggttgcttgtcagttgaccgcaaagtagcgggaatcgtgccccgggctgctcgggttaaaatccagtattttgaccaagatggccagaagcatgaagaacgcttgcgcaactacccagctattgtggttcaacatgaaatcgaccacttaaatggcgttctcttctttgaccggattgatcccgataaccctctggccctaccagatgacgtggaattattaggggttaactaacctaacttaccttgatcatcccatattaataaaacaaaacgctcaaggcttgtccatagtacgaagctttgagctttcttttgtgaatttatagtaaatgaaggccagcttactaaagcgttagaccttaatgcaaagtctccttgtcacaatctattctcatcctagcatatgtaaatctatacttgaagatagacttgtgataaactataaagtagctctaattgggcccaagacgccaattagaaatagaactggaaaatattttttatgataaggagatataagacaagatgacagtcgacataaataacaatgaagttgccatatttggtatcggaggcttagatgaaattggtaaaaacacctatggcgtccaatttcaagacgaaatcatcatcattgatgcagggatcaagttcccagaagacagtttgctggggatcgactatgtgattcccgactacacctacttggtcgaaaaccaagataagatcaaggggctttttattacccactcccacgaagaccacgttgggggcatcccctatttactaaaagagatcaatgtcccgatttatgccggtcacctagcttctgctatgatccgcaacaaactcagcgagcacaaactcttgcggtcaactgaaattcacgaaatcgatgaagatacagttattaagttggacaagacatcagttggcttctttaaaacgacccactctgtccctgaatcatacgggattgttgtcaaaacacctaacggcaacattgtccaaacgggtgacttcaaatttgactttaccccagttggtcaacgcgccaacctccacaagatggctcgtatcggtgaagaaggtgtcctggccctcctatctgattctaccaacgctgaggtttccggctttacccagtcagaacaagtagtgggggaaaccatcctaaaacttttgcaaaatattaatagtcggattatttttgccaccttcgcttctaatgtttctcggattaaccaggtggtccaagccgcccaccaaaccggacggaaaattgcagtctttggtcggtccatgaacaactccgttgaagtggcccaagaaatggggattattgaatctgatacggatattttcgtcaatgcccatgacttaaaacagctagatcctcaagagactttaatcctctgtacagggtctcagggtgaacccatggctgctttgagtcgaattgccaatggaagccacaggcaaatttccatccagccaggtgataccgtggtcttctcttcctcgccgattccaggcaacaccacttccgttaataatgtcatcaaccaattgatggaggctggcgctgaggttatccacggcgaggtcaacaccatccacacttccggtcacggtagccaggaagagcaaaaattgatgctcagtctcatgcgaccgaaattcttcattcctatccacggagagcaccggatgcaaaaaatccacgccaacttagctatccaaaccggagtagaaaaaaacaactgcttcattttggataacggtcaggtcctagccatgaccgaagattcagcccgcttagctggtgatttcccagccgggtcagtttacatcgacggcagtgggatcggggacattggcagtgtggtattaagagaccggaagaacctatctgataacggcttagttgtagtcgtcgcaaccatcgatacccaaaaacgacaggttattgctggaccggatatcgtctcccggggctttatttacatgcgggagtcagaagatttgatcaagcaggcccaaagagtcgcctaccagtccatccaagactccttccaatacaagcatgtcaatgaatataagctccgcaataacctgacagaagccgttaaatccttcttatttgaagaaaccgaacggaaacccattatcctacctgttgtattaaccagtaattaaactgaataaaaaatcaaacaaaaaagccgagacaattgtctcggcttttttactcagctaaaccatggcggtaggcgtagatagcagcctgggttcggtccaccacatctaacttagacaagatattggaaacatgagttttaaccgtcttcaaggtaataaagcaagcatcagaaatttcctggttactatagcccttagcaatataagaaaggatttccagctctcttttggtcaagtcatcatgaggctggcttgcctggtcatggctgtgcctttgaataactttctgggtcacctcttcttcaaaaacgctatcccctttgtcaatggcccggatagcattggctatttcagcagcagaagaagttttgagcaaatagccacttgccccggactccatggccgggaagaccttctcatcatcaataaagctggttaggataataattttggcttggggccattctgtcattatagccttggtggcttggatgccatccatcccatccataaccaagtccatcaaaataatatccggtttttgggttaaggccatctccacgcctgtttgtccattgtcagcctcaccgaccacttccatatcactctggatggaaaaataagacgataaacccagtcggaccatgggatggtcatcgactaacattactttaatcattagcttcctccaaatctatcggaatcgttatctccacactggtcccttgattttttagggagacaatcttgacattgccccccatgccagaaattctctcctcaatattagccaagccataagagccagaccggtcctcgtctaggtcaaagcctaggccatcatccactacccttaagacaatcttttgaggcctttctttgagatagacttccacttcctcagcttgagagtgtcttaagacattagataaaagttcttggaccactcggaagaggtcatcttctatactggtgggtaaggtcacctcgtctaaatcttgcttgatagccatcttaaccttactggctaactcttttaataagtgactgatgccttcttttagagacttattgttgagttggacaggccgcaagtgcagcaagagggcccgcatttctaattgagagttgttaattatctgctccacattagccaactgctggctgatagccggatagtcttgagccaagaggtcttgctcatttatagccgataaaatcatagaagaggcaaaaaggtgctggctgactgaatcgtggagctcccgggcaatccgtttgcgttcagcctccaaaatttcttcccgggtctccgtccccaactgggcctgctcttccttagttaaaaggatttcattggaaatgctgatcaattttttctggagctgtaaaaaggcctggtcaattttggggctgatctgagccttgggggcataagtcatccgggctattaagttggaagaataatttccttcaatgagcgacttcaaggcttgttcaatttttcggtctcgccggtattttaaaagggtggggatcccgtaaaaagccagggtcaaaataaaggaaaaaataagcaagaccattaagtagggaaaggagtaatagtcatctattactaaacccactaggctatattccgtaaagtatctgagagtgaccgctatagccaaaatcaagatgatgatgaccaagatattggttaagataagtcttttgatatgatctttcataagaagaccacctcaacatctccaaaaatactggttgtcataatttttaacttgcggtcggtctggtcaaaatggtctgaccggtaagtgaccacctcattgtttaaggttaactcgtcctccccaatccgtaccttgcctagcaaaatactaatgtccaaagaaacagcgacctcttggggaatcaaaatcttcaagtccccaaaaaccttgcggattagtataacattttgatccttgggcatgatggtgttgcccaaatcaatgaaggtgtcccctgcaaacttggtatagacaatatcttcccattgataaaccaaattttcatcgctttcgcgaccaatccacttacgccgtgtccgcttgatggatctttcgtggtcttggtcaaattttactgagatatattcactacccgtccaggaaaaatttgtttcaaacaagctatctttcagcgattgaaagaaagactggttccgagtaaaaataatgataacaaggatggctaagataatccaagccgaataggtattgagcaaggccaggctgatggcagccaagctcatgatgaacattaaactatatgactctttccccttgctttgggttaggtataaacccacgatccctgctaggatcaatatcaaggggaagggactggccgcaagctcaaggcccatgctagcgactaggaccaatattaggatgaaaatgacgacatctttatttattctgtccatgagattggctcctattctttaatacccttattatactggttaaaagagccgatttatagcttttataggcaagatcagtcttaggtcccattcaccactggataagttaaaaaagctggaataaaatccagcttttttcctaggctacttctattatttcgacattcatagctccacctggggtttgaatctcaaccaggtcccctacttgtttatccaaaagggcttgggcaattggagattcattggagatcttgccagcgaaggggtcgctttccgccttgccgacgatagtgtattcttcttcaatcccatctggcaactctttaaagcaggacaaggctgcctacactgactcggccgtcgattatcattattttatcaataatttccacattttgtagcatgtgtatgcaaggtgcttgatcacgaccctcgataaagagcctgttacatgccttggactgattcatattccgagttctctgacaagtcaccaaaaccccgggcgatcttgattcgctcaaccacttgcgggcgtttattggactattaagtcttccagttctgcttctaatttttccttaccttcccgtgtcatcgggtaaactttttcatctgacatacttatcacctttactttttatttcaatgaggctaagataccatggtctccttaaaatgtaaagaaattacctggttccaagctcttttattgtctttcatcaaaaatattttgaattttagtcgtaaccaagtcaatagccacctggttttgcgacccttctgggatgataatatcggcatagcgtttagagggttcaataaattgttcatgcatttgcttgaccacactaagatactggtcaatgatggagtccaagctccgaccccggtcttgcatgtcccgcttaatccgcctgataatccggatgtcatcatcagtatccacataaattttaatgtccatcaagttacgcaaggcttggtccactaaaaccatgataccttccacaataataacttccttaggctcctggtggatgacctctgaactcctggtgtgacgtttatagtcatagacaggtacatcgacagcctggttatttaagagggccttgagttgatcgaccatgagttctgtatcaaaggctagggggtggtcataattagtcttgagtcggtcttggaagtccaaatgactctggtccttgtaataagaatcatgctctaagatcatgatggacttaccggggaagtggttgtaaatcgccttggtaacactggttttcccactgcccgacccaccggttacccctatgaccaagggcttttccttttcatccattttttcaccttcatccctacaccataaaacattggaccgaggcccaatgttttgtggcttttctattcatttaatcggaataaaatcctattcttctggttctgcctcagtttcttcagtctcttggccttcttctgaaccatccccattgtctctcaagtattggttttggtattccaagtgttgttcataggtctctgagaagtagacttccttggtttccaaatcagctaggaagtaaagatagtctgtttcaactgggtttacagctgcatcaatggaattggcagaagggctgttaactggcccaggtcccagtccagtatgctggtaggtattgtaggctgaatcaacttctaagtcatcataactaatccgctcttggtgctgtcctagggcataggtgacactgacatcggtttgcagcatcatccccaggtccaagcggttgtggaagacaccggagattacttgccggtcctcatccgtgattccctccctttcaataaaggaagccagggtaaggatttcatggacggtaaagtcagatgcttcaatatcactcaggtgaggttccacaacggcattcatttggctaatcattcggccaacgatggtctccagtgagtcctcttcagtgtactcataagtagccggatagagataaccttccaacttataccgggtatcatcccggtcagccgtctcccctaagaggtcagggtaattttcagcttggccttggataaagtcttcatcctggactaggtccataaattcctcttctgtgtactgggtttcattgccgatgatttcagcaaattgctctaacatatagccctcagggacattgaaggttgctgtttcaaccccaatcggttgcccaccctcttggagatagtccgtaatctcttttaaagacatagacggtgacatttcataagtcccagcctggaaatcttgctcatcattcattcttaaataagtattatacacaaaggcactgtcaatgaccccttcttcctccaaaatagaggcaatattggaccgggaagtcccctgggggatttccacttcaataacttcatcacttgtttcatccttgggtccaagggctgaattgacaaaaaagtagcctgataccaaaaaaacaagcaaaaggacgaccaagaccgataaggtgatggtcactatttttttgacagtcctatccgaaccattctttaccataacttaacctaccttctatcacaaatacatactcggaaacattataccgaatctatcaataaaagcaaaaatatagcgaatgatttttgtggttttaaaaacactgtaacatttgtaaagtcatgtaggcaaggataaagctaggctggcctataaaagatttaaaataattgctataatggaaattaaaagattagatcagggagtgttcttatgccagagataaattcgaccattgcatccatgtccattccacaaactaggtacttttctaataaggctagtgactatgatgatgccgtcaacctcacacttggagttcccgactttgacaccgacccccttattaagcaagctctagtcgatgcctttgttgacaagaagtccctgaaatattcccacaatgcgggtttaattgaactgagacaggccattagcgactattacttcaacaaataccaggtccactttgaccctgaagaccaaatcattgtgactgctggaggaagtgaagccattgactcctctttaagaactattttggaaaagggcgaccaagtcattatcccccaaccagcctatcctgcctaccaggcaattgtgaccatgttaggcggtgaggtcatcccaatcgacacctcagagactaactttgtcctcagcccacaacaagtagaggaaaaaatcactccaaaaaccaaagctatcatcttaaactatccgaccaaccccactggtgtgtctgtaaatcaagaccaggcccaagccttggtcaaggtcatcaaagaccatgatattttcctcttgagcgatgaaatttatggtgaaaacagtttgacccaagaccatgtcagcttcagtcaatttcctgaaatcaaggaccaggcaattatcattaatggcctatccaagtctcatgccatgaccggctggcgactcggttacctcttaagttctaaaaaacttacccagtccatcctcatcccccacctcaacaatactatctgtgccagccttcctagccaatacgctggtctggctgccctcaaacatggcctccatattcctcaaaaaatgaaccaggcctaccgggagcgactagcatacctggttcagcgcttggataagatgggcctcgactatagcaaatcccaaggaagcttttacatcttcccttcaattaagtcctatgaccccaatgcctttaacttttgcctaaacttactagaagaccagcatcttgctgtggttcctggctctgcttttggtcaagctggcgaaggctatatccgaatttcctttgccacttcccttgaccaacttgaagaagggatggaccggctagaaacattcctgtccacttactctactggagattaggtctggcaagaagaatccaataaatcgatattatttatgacaaaggaggaagctagaaaacttcccccttttataccccctagcttcattttacggctaggggattttagtaattcgtttcgttaacatcttagtttagtcaaaaacttcattttgcaagacttggtcaatgtcctgtctcttggttaccagcttgtggtccttgcctttgacaaagaccacagctggtttaagcatgagattatagttggaagacatggaataatggtaggccccggtagctaagacagccagtctgtctcctacttgtaatgactgggggaggggcttgtttttcccgataatatcgccactttcacatagcttgcctactacctgcttgggcttccaggaggaattggatggggctttagtggtgggcaagatagtatactcagcaccgtataaggctgtccggatatggtcactcattcctccgtcaatggaaacataagacggatagcctggaacttgcttgatggtaccgacttcataaagggttacagcagtgtgccccaccaaagaccggcctggttcaatacctaatttgggtagctggtaatctttttcctggcagtagtccataatagccccagctagtttggcgatgccgggttggacgtcaaaagccacatcctcttcctgatactgaatgctaaagcctccacccatgtttaagaactggactggaatctcttggtcatgggcccagtctaaaaccaactgagccgtttcaagcatcacacttggatcttggacctgggaaccccaagtggaaatggagaccgataaaattcaacttaggacaagctataaccttatcaatggcttgcttggccaagccctctcgaagcgaaaaaccaaacttgctatcttcctgacctgtctggatgtaggcatgggtctgaacagctatacctggattaagccggaccatcacatccacttcatcctgggctaggtcattgatccggtcaatttcttcaaaagaatcagctacaaagtgaccaatgccggcttgcaaggcaaatttgatttcctccaggctcttattattgccatgaaagtgaattcggtctgccgggaagcccgctttaagggctaggtataattccccataagagaccacatctaagtctaagccccaatcagccatcaacctcaataagtagacattactaaaagccttactagcataggaaatactgtaaaagtcatctgccttagcctggtcacttaagtctaaaccctggcggaaaccctcctggtacttgtgaatagtggcttcgatttcctcctggtcgtaaacaattaagggggtttggtagtggtctgcaagactatctaagctaagctggcccatagacaatttttggtcatcgttataataaagcgacattagtcatactcctttatcaagctgtttaaattcaaggctgacaactgctgggaattggcccctacacctttgtgggtgaagtagtctatccgaaggttcggatcggggctataaaggtagacccggtccccaatttgaacctggtcatctacttcaaccaagaggtggctcatcattaaaccaacgatggggtaatctttgcccctgatctggcaggggtagtcggcccgagcttgcaataggccgtccccatagccaatatccacgatggccagttgggtcggttgatgggatgcctggtatttgaaggaatagcctgcatattggccctggtttagctgtctaacctggaccacagaagctgacactgtcagtgattgatcaatccggtcattggccaagtcatcataaggtttggccccatacaaggcaatccccagtcggctatgggtatggtggggtaagagtcctccttccctgaagaaactggccgaattttgggcatggatgtagtgaaactggtaaccatcatcgaggaggtcttctaaaaggtcaagccattcttctctttccttactgtattcatctcctggtccatccaggtcatcggcatagccaaaatgggtccaaataccctggatgtctagcttgtttcggtgagctaggacttggtcaatttcctcccggttttttaagccagaccggtgcaagtggctctcatactctaactggaggggaaggtcttcaagctggtctttgaaagtataaaaataatctaaagaggttagggtcaattgaatatggtattttcgggctaagtcaaattctctggtcgggttagtgagtaaaatcgtcgcttggggcgcccttttccggacggctatagcctcatgtaaagaggttgtgacaaaatgctggatgccgatttgtaaaaactggtctacagcaaaatccaaaccgaaattataggcattattcttaaccacagcaaagcagtccgccttttggactaatttctcggcattttcttgaaaaacctggctgtcgacagtccatcttcctggcattttatccctcctccttactagctatatccaagtccagtagcttttcataatagtccgctattttgattaggttcatttcgtcaaaattgaattcaggtgtatgaagacccgcagtaaagtttttgtccaggttttggactccaaaaaaaacaaaataagatggcgctagtcttttgtaaaaactaaagtcttcaccaaataggaagggtcggtctgcctccaccccgattaagcctacctggtcaatggcctgctgtacctctgctttcaaacttgggtggttgtcagtgggtggataaccttggttgtaggtcaaatcagcctccaccccggtcatgctttggactgactcaaccagtttacttaaggattctttaatgacttgcaagtcactggcttcataagtccggatggtgccctctaagtagccatcttgggcgaccgtgttgatggcctcacctgctctcacttggccaatatggataatattatggtttagtccgttcaagtggtagtgattgataagggggatctggcttaagaggatagacaaggcttcaatagccgaatgtccttcttccttgtgggctacatgggcagattgtccctttaagtagatccggtattctgtagcggaagcggtaatggggccatccttgtaaataacccggccttcttctaggctaggcaagaggtggactccgtaaactttttctacattaaaatcatcaaaggcacctgcttcaagcagtaagttgcccccaccatagctttcttctgcaggttggaagatgaatataacattggccttcaagtctcctgcctggtggcggtcgcttaaccgcttggcaaataagagaagagctgtcatgtggccatcatgaccacaagcgtgcatgacacctggtgttttactttgaaagtcatggtcttgcttttcctgaataggcagagcgtcgatatctgaccgaaaggcaataaagctgtcgctatcactatctcctttcatataggccaagacccctgtatccagaggtctgacatactgaatgccccactcctctaaataggaaataatagcttgggtagtttggtgttcttccaggctctcttcagctaactggtggagcttccggcgtgtttctaccacaaattgaccctggtccatattctaacctgtctcccttcatctttcattgctggtcatctaattgtcttaaggcttgggcaatttcttttttattgtcgtccacatcttggacagattttataaccttagccggtgttccagctacgaccttgtgggcaggcacatctttggtcacgactgacccagctgccacaatcgctccttggccaatacggactccttctaaaacaaccgcattagccccgataaaggcatcatcttcgaccacaactgggtcagcagaagggggttcaatgacacctgctagaacagcacccgctccaatatgagcatttttacccgtaatcgcccggccacccaggcaggctcccatgtcaatcatggtccctgggccgacgacggcaccgatattaataacggctcccatcataacgacagctccatcgtggatttcagcctcttcccgaataaaggaaccgggttcaatccgggcattgacctgggtcaggtccttgagtggaatggctgaattgcgtcggtccagctccacttcagattggtccactaagtcccggtggtcagcgataaaggcctgccaatcttttaactcagtgaaaataacaagagattggtctgtcccaaaaactttaaaagaatctgggaaagttgtctttgaaaagtctccattaacataaacttttaccggggttgacttcttagcctggctgatatactcgataatttcttgggcattcttttcttggatattgtcagtcataaaagcctcctataagttgtcaaagctgtagtaaccgggttctttgtcaatcaatttcgccccagcccggagagcccctctggcaaaaatagccttggaccctgcctggtgggaaatcttgatactttcatctggtccagcaaatagaacttcatggtcccccacaatgctgccccctcttaaggtatgaatcccaatctcatcggggttccgtttgcctgaagcttcatgccgatcatagttagggtaagagtcaggtctagcctcactgactaggtctaacaattttaccaatgttccacttggggcatccactttttgattgtggtgggcttccaaaagttcaacatcgtaatcctggaggagactaagcgccttttctaggatttggcttagggcatggatcccataactcatattggcttcgaaaaagaccggaacatggtctgcttgctggtgtaaggctgcttgaattttgtctttttcccctgtggtggctactactataggcacttggaggtcctcttctagcaaggggagaaggtggtcagggtgagaaaaatcaatgatcaaatctgctgaagcctggttaaaggaatccagactaggatagtcttcttgctggtttggggccactaccccgacaatagtatgaccttggtcttgagcgacttgagccactaactgattcatggtcccgtatccacttaagataatattcatgattgcactccttcatggtatctttggtaagctttaatcaattcaatctcttctttcggtcccaattcaacaaggggtaggcgaagcttgttttgggccaagttgaggtggtgggctaaggccttaatcggaattggattgacatcaacattcaaggcctccaccaagtcaaacaaggcttggtagttcccttctggttggtcatagacttgttggaagtcgctagggagaacgttggccaagaccgatattaccccatggccacccagttggtagtaggactggatattgccatcgttgccactgtagaaactaaaggtgtcttgaaccctttccttggcttgcttaaagaagtccaagtcccctgtggcatctttcaaaccaatgatttgggggtggtggcttaactcttctagggtggctaattcaattcgcatccctgtccggcctggcacatcatagaggatggctggcaaatcgacttctcctagaatactttcatagtgtttgattaagcctcgctggttggttttattatagtaaggggtaattagcaagagaccatctgctcctagtgcctgggctgccttggcattttcaatggactgggccgtattgttggtaccgacattggcaataactttaaccttggaatcagccaagtccaccactgtttttaagattttttccttttcatccttggtcaaggtggagctttccccagttgtaccattgacaataagggcctgactttggttctggattaaaaaattgaccagttgacttaagctagtatagtccacctgtccccagtcattgaagggggtgaaaagggctacacctgtacctgtgaataagtgactcatgatgtcctcctatcttttagcctctgcttttcattacttcttctaagatttggacggtgtttaaagctgctcctttgagcaggttgtctgctgtacaccagatatggaaggtgttggacagggtggcgtcagaccgaatccggccaacataaatatcatcactaccagcggcttctaaggcttgggggtaaatctcttggtctggttggtctcttaagaccactctggggtcctggtcgaatagggcttgaatggaagccacgtcagtcggttggtctaaactaacattgatatgaacactgtgtccatccgataccggaacccgggcacaggtggcggtggtcggaatgtctttgcctaggattttctgggtttcgtcaatcatcttttgttcttctttggtgtagccatctggtaaaaactggtcaatatgggggaggacattgttgtatatgggataaggataagccttaggtggggtaccctctggtccattagccaagtcctccaaacctgccttacctgacccggaaacagcttgataggttgtataggctacccgagtgacttggtaggcctcatctaatattttgaggggaacaactgattgtatagtggagcagttagggttggcgatgatatggcggttcaatttagcctggttgacccctgggacgactaagtccatgtcatcttcgtttcgaaagcgactggaattatcaatcacaatggctccactggcttcaaaaataggagcaaattggtcactgactgagctgcctgcactcattaaaacataatcaaagccttcttgggccgcttgatcagtcagctcgcgaactgtcaatggttggtctttaaaaacaagttccctaccagctgaccgactggaagaaaagagggtgaggtcatcaatttccacccctcttcggtccaaaacgtctaaaattttacggccaacaacacctgtagcacctacaactgctaatttaaccatttatatcctcctttgttattccaaaagcctggcacaagctagcaactgcttggtctgccttcttacgatcgatgacataagaaatactaatttctgaagtggtggtctggtaaaaaggaatagcctggttgatcaaggccataaatgctttggaagcgactccggacatctcacgcatcccggacccaaccaaggaaattttggcataatggtcgctaatcacgtaagataaggcaggatagtcttctttcaggccttgtaaccagtgtgacagggtattggattcatccgactggtaggtaaaggaaaactgcaaggcttggtcgttattaatctgagagatcatgtccacattaatttcgtttttttgtaaaaattcaaacaaccgtcttaaaagattgatgttttgatcgggataggtcatggtaatatgggacatgtccatatccaaggctacccccgttactgctttcttttcaaataattcctcttcagccactacccatgttcctccttggtctgataatgttttccccaggtatatcttgacaccataatttttggctatctccacgctccggctctccaaaacgcctgcacccaaggcggacaattccatcatttcttcataggtgatcaagtctagcttgggagcttgaggaaaaacccgggggtcagtcgcaaacacacctggaacgtcagtatatatttcgcaaggggcctttagtgaagctgcaatggccactgccgttgtatcactaccgccccgaccgagggtggtcatgtctgagtcttggttgaccccctgaaagccggccacaaccaggcaatcatagtccttcaacttgtcttgaaagagacccgggtccatagtcttgatcttactttttaaaacatggcctgaggtcttaatgcctgcctggtagccggtcaaggatttagacttgacacctaagtcatttaaaaccaaagaaagataggaaaccgattgttgctctccggtcgataggagcaaagccaagtcttcatttttaggatctggtgtcaaactagccaccgaagctaatagctggtccgtggtcttgcccatggcactgacgactacgatacattggtcgccttggtctacccgcttttggatgtagcgggcaatatctttaatttggtcaaaattactaacggacgacccaccgtattttaagactgaaacagacataagtcctcctttaatcaaacaatgaaaaaagacaagttcgagtggccgaacttgtcccaaaaattaactacagtggtataaaacaagtgatgcactccattattaaaataatgacagacccatagctcttaacctctaggtccaaaacttctaagctgtaacttagacgaatctcggcacgtcaccctttcacctaaacccgcttacaggcagtctatttaggctagttatgatccgtgcgcctcatcaatagtgttataaaatatttaaatgtttgctttagctttatttcttagcttgactatcatattaaataaaatgagaaaataagtcaaataaaatcattatttttttattgatttgtcagccggaaagatcttcttctgcaatgtactaaccagataaataaaaggaggcctacaagcctccttctttaaaatattaatcctagtcttcttcctcttctaaaaaggtattcaagacttcttcaaccatgtcccattcttggtcagactcaatcggaagcagttggccttctaatcctccatcttcttcccggtaagcaaaggctttgagttcaatctcttcattgtcagcttccttggctgggtaaagtaagacataagatcggtcaaaatcttctgattcaaaagtaaataagatttcgtgcaattcctcattgccgtcttggtcgatcaagtttaagtagtcatggtcattgttactcgacataagcatcctcatttctgtctatccatataagtctgtaaaatagcctgagcagccagcttgtcaaccagttgcttacgcttcttcctggaaaggtcgccttcttcgatcatcatccggttaacctgcatggtggtcaagcgttcatcttggtaagtcactgctaccccgcaggcttcctcgagcatgcggccataattcaagcttgcttgggcccggtctccaattgacccatccatatttttaggcaggcctacaacaactttagagacctcgtatgcctcaaccaaggcacagacttggtccaggccaaattcttttctattttcattgattttgatggtttccaaggactgggcagtccaacccaaagggtcgctcactgcgatgccaactgtcttggatcccacatcaagacccattaccctcatttttcgtcgatatggtccatgtaaaaggtaatgagttcttctaagatttcgtctcgttcatgacgtttaatcaaattacgtgagtcattgtggcgaggaatgtatgctgggtcccctgataataaataacctacgatttgattggttggattatagcccttttcttctaaagattgataaacggttttaagtgtttgactcacttcttgttcgccatcaatctcaaagttaaagcgcatggtacgatcgccatgatcagtgttagacatacttcttcctcctattcttcatggaactacctactaactatcttactaaaaaaacaaaaatttaacaatactttctagcttagttccctctatcttctctagagtaatcaaacatatgtgacacccgcttctaggaataacgcttgttagcctaaacaaccaactcattttttcgccctaccggtcaaggaggaaagcgtagcggtccttgaccgggagaagaaaaaatgtaaactgatgaaggctaagaagcgacttctgccctatactgatcgaccacttgattaggacttcgaaaattgaggacttttcggacaatgttattatggcgactcatataccgctggtgttgcttcttcatatccgcttccgatgtaaaaacgcgcttactataaaaacgaacttgatcttcccggtggcttctttcgacctttccgttttgccaaggggagtagggccgggtgtttcggtactgaatgccaagctcttttaagcgttgttcaaacaaggtctttttcgttgttttatcgggatcgttaacaaactcagcccctttatcagtttgaaccatctgaatttgaaagcccagctggtcttgtaaatcaagcagaaattgggccgtatgcgtgacacttttttcgtcgacgatggtacagtgtcgtttgcgagagaactcatcaatggccgtgatttggtagtaacgacggtcataactctcaaactgaatgcattcatgagggacgtatttgatatcaatttggactttttcaccgggataagacaccgggtccgcttgccattttgatttgggatagcgtttgggggcagcttcttccgacatcccccatttgcggtctctaatctgcttactcatactgccataggaccgacgatagccccttttctgacattcaacgtaaacctgggcaagcccttcatggccatagcgttgataaacttttttaatcaaggtcagctcctctttttggtgctgacgaggatggctatggggccgagtggactggtttcgcagactttcgaccgtgccatcataacggtctcgccaccgtttgacctgcatccggttggtgtggtaacggcgggctgcttgggcattgttgccctgtttgatcgcatattttacaactttttcgcgataacgcatttcttctgttataatagccatacgaggatgcttcctttctgttgggtgctaacttcagtatagcagaagcatcctcttttttaatggttttgtgtcacataagtattatactctaacattctagcttagttccctctatcttcaagccaggtaaaggtttcttgtaaggctttttctaatccgtctggctgagatccccctgcctgggctaagtcaggacggcctccaccgccaccaccgacaaattgggccaggtgcttaattaagtccccagccttgatgccgtttgcgatagcagactcctgacaagccacaataagattgaccttcccacccttacgcaagcctagaacaaggatatcagaatagtccgactctttccacttatcagctagttgccggagttgtcccatgtctttaaccttagcttcttgagcgatcacttggtaacctgccacttcttggacatcttggaatatattgtcagcttgttggttggctaaacgagcgttcaaggattcattttccttgtctagggcctttaagtcgttttggaggctggtaatgcgttgcaatacatcctggctggtctgagcttttaactggtcttgggcctggtctaagagctgggttttttcgtccaaccattcataggctgcccggctagtgacggcaacaatccgccgggtccctgctccaatcccagattcactggtaattttaaagaggccaatatccccagtagtcttcacgtgggttccaccacatagttccttggagtagtcatcgaccaagaccactcggacttcctggctatatttttcaccgaaaagtgccatggctcccatttctttagccttatcaagactagtcaccttggtttccaagccaatattatcccaaattttctggttgacaatccgctcaacttgcttcaattcaccgggttcaagtggcgaaaagtgggtaaagtcgaaccgaagtaagtcttcattcactaaagaccccgcttggttgacatgagaacccaagacgtctttcaaggcttggtggaggaggtgggtagctgtgtggtttttctcgacaagggaccttcttttggcgtctactgtcaagagataagtctccccaactttaaggggttggaccacatcgactaggtggaggtgttggtcgccaggacctgactggacatcagttacatgggcaactacttcttggtttaagttacggacggtgccctggtcaccgacctgtcctcccttttcggcatagaaaggggttgcgtcaaaaatcaaacgggcttgcccttgaccgacttcttcctggacttggtcgtctgccaaaatggtgacaagttgcccttgactttcaagttggtcataacctaaaaagtcatcggagacatctaacttggtcaagaggtctgattgcacctgcatggactggtcatcacttctggcagcccgggcccggtttttttgtttttccatttctgcctggtagccttcaaaatccacttggactcctttttctttagcgatctcttctgttaattcaactggaaagccataggtatcgtaaagtaagaaggcatcctgaccagaaagtaagttttcgccctcttcctgcaatttctccaagattgtactcaagtggctcgacccctctgtaagggtttcaaaaaaccgttcttcttccttaaggacaagatcttgaatcaagtctgccttgtcaacgacttccttgtagtgactagctgtaatctgaccaacaatgggaacaagatggtggaggaaggggtggtagatgcccaaacgacgaccatgcatgactgcccttctcaagagtcggcggaggacataaccccgaccttcattagatggcaaggccccatccccgatggcaaaagaaatagcccggatgtggtcagcaatgaccttaaagctcatcttattcgcttcatcgtcgtagctttgtccggatatctcttcaaccttgtggataatgggcataaagaggtcagtttcaaagttggtaggagcatcttggacgatggacaacatccgttctaagcccatacctgtatcaatgttcttgttggggaggggttcataactgtcatcttccttgtggttaaattgggagaaaacgaggttccaaatttccaaccaacgggagttttccccacctggatagttttctttttcaggcaaatctgcttctaaatattccggcccccggtcataaaagatctcagtattgggtccagatgggccaagacctatgtcccagaagttaccttcttctccgataatgtggtcttcggacaagcccacaacgtcatgccaaatccggtgagcttcagtgtcatccggatagatagtgacatagagcaagtctgggtcaatggccatccatctattccctgttaaaaattcccaggcccaaacaatggcttcttctttaaagtagtccccaattgaaaagttgcccaacatttcaaagagggtgtggtggcgggcagttcgtcccacgttttcaatatcattggtccggatactcttttgggcattgacgatgcgaggattgtcgggggttaaacttccgtcaaaatatttttttaaggttgcgacaccagagttaatccaaagcaagctagggtcatttacggggatgagggaggcacttggcttgacttcatggcccttttctttaaaaaagtctaaaaacaattgtctgagctctgacccagttaagtatttcattttaaccatcctttttacttttatgatcaatccgaagaagctagattactgtcttcactattctatcggtctcctaactataagttatgaaaaaaaggcaataccactgcatgtaagggcgtcaatcgcggtaccaccttacttgcaataatattgccattattacatctttgaactcgctaacgctgaggagcggattaatttcttaatcaaatctttccgatagggagcacactaggccttgaccgtattttacagcaaccaatacgtctctacttgttcaatcaacctattgtatatcctatacaagccttaatataccttttatcaatggtcttgtcaattttttcttttattccttactgtcaactacttcttcgacaaattgggagttcccataagactcaaatttattagcaagagagaagccccttcccataacctcagaagcactcatcacaaccacaaaggcttcctcatcatattggaggatcatttccttgaggtaagggaactcacgctcgggaatgacacacatcaacatgtcccggttttggttggccatgccacctcggatcccaatattggtgaccccccggttgatggtgttcataatgagtttcttaatgctttcagattctttcgaaataataagtacatttttgtgggaccggatcccgacctgggtcatgtcaatagaccgggtggtaatgtaaaggttgataaaaccatacaaaacagtgttgacttggaaggttgtgagagaaagcaagattaccaaaccatcagacaacatagtagttgcccctaaggacaagcctgtgtatttatttagaatttgggctaggatagaggttccacctgttgaagccttggcccggaaaactatccccagacctattccattgacgatacccccgataacagttgctaagaagatatcagtagtggccggctgccagttgccaattaaggaaataaagagaggcaggattaaactggctaaaatagtccggttaccggcttccttaccgaggaaaatataggcaactaaaagtaagggaatattaaataagtactggataaaaactggagaccaacccaacaagtccgaaaagacaatggaaagaccggtgacgcctccggatacgatattatttggcagtaaaaaaagctggaaggcaactgctacaataaaggtgcccactagcatgtacacgtagtctgcgatagaaaaagaataccgcttggctaattctatcaatttactcatcctttcattatttttaaaaaatttattctccagtataataagattaagtttggataaggaggataaatatgaagcaagctgacagacgttattatttcatcatcaatatctttgctaatcgtggctcagaagcaagtgataaattaagtcgactcttaaaacaaagtaagctagactataaactatttaaaacgtctaggcactacaatattaaagatattgtccaaaaaattcaagactctttacataatcgtgacattataatttctgtcggtggggacgggtctttgggggacttagtacaagccctaaaagaagccggtctgtctaacccagttggagtcttgcctgctggggcaggcaatgattttatccgagcccaccaggtttccaccaagttcgaagaggcttttgaccacctgctacaagtccaagaaccagttgttaacgacttaatcctggttgaaaatgccaaagacaaagcatacgtggtcaacagtattggggcggggatcgacggccgggtcatcgccagtatcagccaggataagtcaaaacaaaaatttggccccctgacctatctggcgcctgccgttgaggccttgttctaccagtctccctttgacgctaggattaaaatattaggcagagaaattgaggtaaaaaagactcccatcatcttatttatgaaccatgggtcattcggaggcggaatccaaatcaaccctcaggcagatccgacagatggctttatgaacatcatctttgctaaggacttatcattttgggacttgttaactttagtcgttaaaattttcacttcaaaagaccaactcagccaccctaaggtttaccaagtccgagctaagcaagtagaggttcaagttcggtccaatgaatactggcaggctgatggagagagcctgggttcaaaccagcaaacttataagctcagtagcctaaaacaaagctattggatctaggcgcttaacttgactaagtgggctagaccaagtggctggggtttagtttaaaaaatcataaaggctgattccttccatcccaatcataggattgatggcctgtgaatcaaccaagtcaggagtcaagacgtaatcttttggaccacctggctgttgccctttttccccggcctctgtcttgctggcttgggtctggtctttttcatccagtagctggaagctggtcttatcggttaatagccggtctttcaagctggttttcctcaaatttaccccagtagtcaggcacttgttaaaggctgctttttgtccgcataagatcagaaagtcactggcccgggtgacggctgtgtagagaaggtctttgcgaagcatccgccaatagtcaaaagtcaagggtaggatgaccatcttgtattcgctaccctgggacttgtggatagaagaacaataggacaaggcgattttattccattcattgcgcatgtaggtcacttcattaccatcaaagtcaatcaccaattcatcactattgacctgggattccttggaaggaataatacctgtgatctttccaatgtcgccattgaagacattttggtccggatcattgacctggtggaggaccttgtcgttaatccggaaaattgtgtcgataaattgaacttcttttttgccggggccaggcgggttgattagttcctggactaacttattcaaacggtcaatgcctgcttgtcccttgtacatgggggcaagtacctggatatcttcagccgtaaaacctttggcaatagcattggtcaccacttgttcaatcacttgggcaacctggctaggttcagctggtaagaaagaccggtcagccattttgctagcaaaatcagctggtaaaacctcatttttgatatggtgggccaaggaaacgatcgatgattgatcattctggcggtaaatctcggtaagctcaatcttgtcgatctcttgactatcaatcaggtctttaaaaacctggcccggaccaacggaaggcagttggtccttgtctcccaccaggaccacctgcatttggttgggaacagccttaaagagctggtaggccagccaggtgtcgaccatagacatctcatctattatcaggagctggccttctagctgggtgtcttggtcttcttggtccatgtctgctgtcaagcccaataagcggtggatggtggaagcagggagacctgttgtctcccccatccgcttggctgcccgtccagttggagcagccattaaaataggaaaggcttggtttgggtagtcagctgggtcaagagataagtcatgcacctgggcaaatagttggatcaagccttttaagaccgttgtcttccctgtccctggccctccggtcaaaataaaaaggggagacatgatggcctggaggatggcctccctttgtcctttatcatatgtcaagtcattgtctgcttcgacctctgctaagcagtcgcttaagtaacccttggacaaggcctggctactttgggacttgattcgttcaatggccgagacaattccccattcagagttattgagagacggaagataatagtggtcttgatccttaaaaatcatttcagcctccaccatttccccaattcggtcagccaagtcgcctgggtcaatgatatagtcttgactcttttctaaggtccggatggttgcttccaccatagtctctccttcaaggtaggtatgcccttggttaaggctgtcttctgttaagctatggaccaccccggcatacaaacgctccttggaatcgggcttaattccaatttcatatgcaatttggtcagccttgttgaagccaatatttttaatgtcgtaaattaattggtaggggttattttggatggtggctagggttttttcctcatacttcgcatagatccggtaggccaattcattggaaatcccatattcattcaatttcaagatgattttctggacgcctctttcagcatggacgtttttagcaatcaggtcttttttgtcttgctttaaattgctaacctggtccaaataactagggtcgtccaagataaggtctaaggcattgatgccaagctcatccacaatgttttgggctgttttgggaccaatccccttgaatttcgagcttgacaagtagctaataagggcctcctcactagaaggtttctggtcttcatagcggttagctgcaaactggagcccatacttggggtggctggtcaggtggccatagaaggtatagtcttctccttcctggactcggccaaagtgaccgaccacgacaatatcgccttcatcataaagcatatcttgatcctttatcttaatttttaaaaccttgtaatagttatcaggactggtgaagaaaatcgcaagcactcgtccggtaacataattttcctcctcttgcatcccttcctcctccttcggctaaagtaggcattttttgcttggcaagcttttctgtcttcattatagcgaaaaccagctgcaagaaaaataatccttgtcaaacttttagccaactagtcctttaagtaggtcaagttcttcatggataagtctaaaactggggcattgtagaccatggcaccgctagacaaataatcgatgccaagattttggtagtctttaacattactgaggtcgatattgcctgaacactcaataatagcttgcttgtcaatgagcttaacggcttctcgaatggaatcgatcgccatattatctagcataataatatcagcttgggcttctaaggcctcttgaacaccttctaagctttcgacttccacttcgatttttttgacatagcgggtatagtccctgactttggctacagcttcttttattgatccggcggcgtcaatgtggttgtccttaatcaagattccatcactcaggttgtagcggtggttaaacccacctcctactttgacggcgtatttttcgaaaaccctcatattgggggtagttttacgggtgtcgaccacactaattgagtcatcatcaagttttgccacataccgagcgacattagtggctattccactcattcgctgcaagtagttcaaggccaccctttccccagataagagggaagagaccctggcttggacctccaaaaccaggtctgaatctttcacccagtccccttcctgcttgtagtctttaaaggtcacctggtcgtcaagcaattgaaagactcgcttaaagacagctaaaccggctaaaatcccctctcccttggctaggagtgaaatctcggccagcctatcttctgtgtagatggcattactggtgacatcttcgtaattaatatcctcttttaaggctagctggatagcctggtcaatttgaaaattctttaattcatataaggtcattttcccctgtcctttgcctttcttgtcttaaatagtcagtttaccgctactttcatatataaaaggatacaggggggcttggcaggtttaatcaagctttccctgtatcctcatgcccttcaaaagcatggttacttcattaaatatattggagttgcttgtcctcgctgtaggcctggtcgatggttccgccacccaagcattcatctccgtcataaaagacaatggcctggccaggagtgactgcccgggcagtttggtcaaagtcgaccctagccgtattgtcttgggcattgtagtggactgtggccggaacttctttagtccggtagcggaacttcgcttggcaacggaaggtctcttggggtttggcttcttgggtaaaggaaaagtcagatgcctctaggtgactagcatagaggtggtcatgatcatagccttgaccgaccaataaaacattccggtccaagtctttaccaatgacaaaccaaggttcattttggtggttgactcccccaccaatgcctaaacccttgcgttggccaatggtatagtacatcaagccgtcatgttggttgacaacttccccgtccagggtctccatattgcctggttgggctggcaggtagtccattaggaagtctttaaagttccgttcaccgataaagcaaataccagtggaatcttttttcttagcagtcgctaatccggctctttcagcaatagcccggacttctttcttgtccatgtcacctaggggaaagaggaccttggataattggtcttgggacaattggttcaagaagtaggtctgatctttattgccatccaagcccttcaagaggtgggcagtcccgtctgcgtcccggagcaaacgggcatagtggccggttgccacataatctgcccccaagtctagggcatagtctaagaaggctctaaatttgatttccttgttgcacatgacatctgggttaggggtccgccccttcttgtattcatctaagaaatactggaagaccttgtcccagtattcttcttcaaagttaactgaataataggggatgccgatttggttggctaccaaggcaacatcattatagtcttgagtcgcggtacagacaccattttcatctgtgtcatcccagttcttcataaagataccaaccacgtcgtagccggcttcttttaaaagtagggctgttactgaagagtcaacgcccccgctcatgccgacaacaacacgggtttgtactttgtctttcatgacaccaccatcatttcttgtttagattttgaaaaatctatcaaattgaaggtttgatcattttccaatagtgactagtatactaacaaaaaagaagagaagcaagcctttcagcctgcttccaaaccatttatgggtctactttttcaaggacccggttggctaccaagtcatccaagatttgctcggcaaagatccgggcatcctggcgctgatcgttcttgtagaggtcaatcttctttaaaccgttgggggctaccgtagatatagtcagatcagttaagtccttgctgacagatatttttaacctgggtgctcttttgtccatcaattgtttggacaagtgacgttcatattgaaagttaccgtttttggtaacagaaaaggcattgtcccttaaggtatagcggacagcctggtcggaaatcccgtagcgggttgtgccacctggcaagctttgagtgtttgacttcatctcttcctcctagtggttattgtctttaagtctttggatagcctgggccaggtcactaacagcctggtcaatgtcctctaaacttaaaccgtagccaaagctaaagcgcaggctttgggacaaggcagggtggtcagaacccaagagggctactaggacatgactttttgtcaagttaccggccgtacaagctgatccagcagcagtttcgacgccgtctaggtcaagttggattaacaatttttctgattcaacgcccttgaggtggacattgaggatgtggtctaaagactggtttaaattcccgttaatagtgtagtcaataccttcttggtctaaatcctggataaatctttgcttcaaggatttaaccagttcttgatagtcatcaaagtggtccagtcgcaattgaaccgccttggcaaaacctgcaatgtaagggatattttcggtccctgcccgtcttttgctttcttggtctccacctaagattaaacttggtaagttaatcccttgtctctggtataaaaaaccaatccctttggggccattaattttgtgggctgaaactgacaggaagtcgacttgtaagtccttaacgtcaattggaaccttgcaataagactggacggcatcggtgtggaagaaggcttggtggttggccaagcggtccccgatagccttgataggttgcaaggagccaatttgattattgccatgcataatagaaaccaaaatggtgtcgtccctcaaggcttggtcaaagtcatctaggtccaccaccccatcctggttaactggtaaataggtcacctcaaaaccaagtgattccaagtagttcataggttttaaaactgactggtgttcgatggctgtcgtaataatatgcttgcccttgtctgcattggcttgggctgtttttatgatagccgtattattgctctcactacccccactggtgatcacaatttcgtcagcttggcaagacaagcttgaagcaaaaacttgccgggcttggtcaatgatggcccgactatcccggcccctttgatagctacttgaagcattgccaaaagtatgggctagggtatcggaaatagtttccacgacttcaggatgaacgggacttgtggctgcatggtctaaataaattcggttcaaacttacatctcctttaagtgtctaatggttgggacgcttaggtagttcaggataaagcatgtttaacacgtcctgggttagccggcgacccaaaccttcatagacataagcgtgcatgttcatagctgggttaaagttcatttcaatcatagtataacctggctggtcaggtgttgtggcctggtgaatatccggtatgataaggtcaatgccagaaaccttcacttcaaggtcttgggccatagcctccgccaccgccttgtaagatggatcaacttggtcactaacctctagagagtctccaccagttgaaatattggaattctcccttaaataaacttcttctccctctttaggcaccgaatcaaagtcatagccttgttggtccagcatgagggcttcaagttcagtcattttgatattggtgagcggggcccggtggttgtccccgcgcaatttatcgtcattcttggcctggatcagttccttaatcgtatgcttgccatctcctaaaacattagccggcttgcgcaagaggaccgaccgagttttgccgtcaataacaaagaagcggtattctgttccttcaatatagtcttctactaagacggatgagtcctctttaaaggcaatagccaaggctttttcataggcttcctggctgaagggctttttaaatatagaaatacctatgccgtaattggtggacttgggcttgacgactagggctttgtttttataagccgggtagtctgcaatggctaggtccaaggaactatactccttgccggaagggacctggtaacccaactcagccaagatcagtttagtcaccgtcttgttggccataatccaatgggaaatataattgtccttgctggtttggttaccattacggacatattccacatggcccttgtagtttaattctagaaactggtcgtcttcatccaaaactctcgcttcaatcccacgctggatggcatcaaaaagaaggagttgactggacatctccatctggtggaaaccccggagcaagaaaggtttgtcccaagccttggccaggttagcctgaccaatatctcgtcccatatccaggtaatctttttctttaaggtccttgatgatctggctagccagggtcaatttagggtcttttaaggccgccttggcttggtcaacctggttgaggtagctagcgggcaggtccgcatgtttaaccaagtaggtcatggcatctaaaattcgaaatccctcttcttttgcttcagctgggatttcttcatggggatggagggtggcaatgtttgagttcaagtcattccctttggcaacggcttcctcatctgcatcttcatcgatccaaaccatggccattaaaaagaggtggataaattccaactcatcctggctgatcccaaattcagcataagggtcgatatcgatgcagcgaagctcaacatattcaattccttcatctaacaaagtctggcttgacccctgactattcttaagccgggcatcgccgtaaaactcccgttcttcaataataacttggtcacgaaccaaatcttggattttgtgggcatagtcctcaacggaagtcaaggggacttggacattggtaaagttgtggtagccatatgaactattccgcaagctccgcatataagaggcaggtggttctttggggtgggtggtcgattcatagaaagacccatccgcataaggggctgccccaaagaggtaggtaatcaaccagtggtagcgtaaaaagttccgggtcaatttaagataaagctcgtccctgaagtccttaaaagtatctggaccagaataggcctggtagagccggtctaaaaagtcctggctaaaggaaaaattaaagtggatgccagaaatcatttgcaactttttgccgtactggtcagctaaaaagttccggtagtctaattcaaactgctcagggacttggataatgtcaatttcatcatcttggggtaggacattgggcatgctaaagggccacaaatactcatcatgctccaaggaacgaaggtaaacatcatgcaaggcttgaagccattggaccgtctcattgatactagaagctgggggagtaatgatctccggctgggcttccccaaagtcggtgatcaaataagggtggtctgccctcttccccaaggctttaggagccatggtctgggccagttgactgtcctttgcagtccgcaaacattctctttcaattcctaggccaagacccttgaaggcagtaaacaagtcttggtcctttatcatttggctaaaattcattccgctcacatcctcaatcttttgcattttcattttaccacagcaagtcttttttatctaagtatgcaactgattattcaccaggttcgtgctatactggtggaaaagttaaaggaggacaaggatggaccaacccttagcttaccgtatgagacccaataccattgaagatattgttggccaagaccacctggttggtgaaaataaaattatctggcggatggtggttgccaaccaactttcgtccatgattttatatggcccacccggcatcggcaaaacaagtatcgccagtgccatcgccgggaccaccaagcatgccttccgcaaattgaatgcggcaaccgacactaaaaaagacctacaggtggtagtcgaagagggaaaaatgagtggcaatgtcatcctcctcttagatgaaatccaccgcctagacaaacccaagcaagacttcctcctcccccacctggagagcggcagggtgattttaatcggagctaccactgaaaatccctatatctctattcaccctgctatcagaagtcggtgtcatatttttgaattaaaggccttgagtcaagacaatatcaagtcagccttgaaccgggcccttcatgatgagaagaacggcttaggcgcttttcaggtcgaaatcagtgaccaagccctcaaccacctggctcaggctaccaatggcgaccttagaagtagccttaatgccttagaactagccgtcaagtcgaccaaaaaagaccaagacgacagagtccacattgacctagcaactgttgaggaatgcacccagcgcaaggccattagccatgacaaggatggggactcccactatgacgtcatgtcagccttacaaaagtctatccggggtagtgatgtccatgctgccctccactatgccggccggttgattgaagcagatgaactggagactctcagccgacgtttgatggtcacagcttatgaagatattggcctagcaaaccctgcaggagcccaaagagcggttgtagcagttatggcaggggaaaggttgggcctgcctgaagctcggatccctctagccaatgctatcgtggaactctgtctatcagacaagtccaactcagcttacatggctattaatgctgccctaaaagatctcaaccaagccaaggacaagtctgtccctgaccacctcaaagacagccactatgctggagccaaaaaattaggacggggcaaggactacctctacccccactcctatcctggggcctgggtagaccaagcctatttgcctaccgccttacaagggagacgttactaccaacccaaggaaaatagcaaatttgagtccgccctcaaacaccaatatgataagtatgacaaagactcataaaataatataaatggttgacacacataaaagtaagtgctaccataatcctgagtttgacacttttttgaaagcaaaacccttccgaaggctgatataacagtctttagaagggttttttatggttcaaaaaaagacgtactaattggctttttttgattggcgtaaaatttttttcatttctttttgggagagaatttcgaggtccgtttcaaaaccaaaaagatcatgtaagcgatccgttaaccgtgtgcgtttgtaggctggaacataggcatcatcttgaacttctaacatttccatttgacgcaaggtttggatgatctcatgggaagtaaaggcatgatctaacttctgttcaagaagccgaaaaaccgttaaggacagaaaacaagtgagaaaatgggcttgaattcgggcatctttacggacataaacgggtcgagatttaaagtcgtttttcatcaatcggaaagaagcttcgatttcccatcgcttttgattaatggaaaggatatcttggacagggtcagtgaggttggtgcagacagcgtaaaagccatcatactgggcttcttcttcgatccgatcttgatcaatcgtatgttcagcttgttgggcaatttcaccttcttgagtgacatgagttgatttgatgaagcgattaacatcattcgctcctttttggtggagccgggaaggctcctgaacttttttgagagctcgatcaatttgcccttgtcgaacagaagcttgatattggcgatattttggggaataactcacgatgaaacgttgctcgagtccattttcatgaatccatctttctttataaaagatatctgaaaaatgagcggtttcatcaatgtcgtctaagtgatagctttccttgccatgactaagtcgccaaccgcttttatctaaaagccagtctttcaaatgttttttcgtttttttgaccgattgagtggtaatgaaggcacgctcccctaaggtgttgtatttgcgattggctgttgaagagagaccggcatcggtacagacgacaaattttgataagcgaaaatccttaaggattcttttctctaaaggtttcagggtggtttgttcattggtgttgccgcttgtgatattaaaagcaagtggaatgcccgagccgtccataaataatcccatttgcacaatggggttcggccgattttccttggaatgcccgtattgtttcaggccttcggcttcttcgatttcaaagaaaaaattggtgcagtcatagtagagaacggcagtttcccggttcgctactttctgacttaatcgataaaaatgttcttgaatatcatgggtatgttcagctaagacatcaagactgcggtaaatatcttgtaactgaaattgaggcggttctaatagggtttgggcaaattcaaaggcactttttttggaggccggactcaaaatccgattgtaaatgagacaagataaaatttgatccaacggatatttaaattgatgctgcttggcgatttttttcgtcatggtggggagtttcaactgagctaaaatggattgtaaaaagaggtaaccaacattaaaaagttgttgtttatctttttttattttcttggttggatcgtagtgaatggcgatcttttgctttttctgtttttcctgttccgttaattcggcggctcgctgtttggcccattcttctggatccatttcgggatgtttttgtttgatttcttcgtgattgcccagtgtttcgacaattttagtggtgcgcttaccgttacgagtaatatctttaataacggcataagaaaccgaattttttgaacgactttttttgatacgcaaagctgatcacctcagggataggataactttattatatcacagtacgtaatagtacgcaatgttatttaataaaattttggcaaaaaaataaagccctgataggctttgtggcactttttgtcatttaaaactgtcaaactcccggttgacacacataaaagtaagtgctaccataatcttaagaattctgtagtgttcgaatcgtcttttcaatcgagttgaccgaacatttatacactgggattcgaaagatggtattcatgacaagccttttcacttggaagtcagatgtaccatcggagaaacccacctgcaattagcgggtacaaccattaagacgatggaacggcacataacggaattcgaatcataactatttatggtgggcatgtccgatttgggcatgccttttttaccgagtttattaaaaaatcctataagaaattaacccttttgcccggtttttgtgttaaaatatacttagaaatagaaatggggtgtcgcaaatgcaagaatacaaaaaagttctagtagggacagatggatccgaaacagccaacttagccttcaagcgagcgatcaattttgctttacaaaataatgcaagcctttacattacacacgtcgttgatacccgggcctccaaaccatatgaagcttttgaccagtcagtctccaacagtatgcggatcgaggctgattccatcttaaaccaatatgaaaaacaagcaagggatgcaggcatccaagatgtccaaactgtcttgaaatacggctcacctaagaagaccatcccacaagtcattagtgaaaagggaatagatatcgtcatcttaggggcaacagggctgaacacctttgaacgcttctttattgggtccgtttccgaatacgtagtccgccgggcagaatgcgatgtcttgattatccgccagtaagtaagccaaataatcgtatattaaaaaaggtcctctccattttggaggggcttttttatgcaataaagcaaggagcttgggtcaatgctccttgctttagtgattttatcttaaaaagtaaaagctttattagtcttttaaagcttccacatcgcgggcaatcattagctcctcatcggtggggatcaagagaactttgactttagaatcatcggttgaaataattctttcctcaccgcggacatcatttttgtctgggtcaacttttaagcctaagaaggaaaggccatctgctacagcttgacggacattggccgcattttcaccaataccagcagtaaagactaatacatcgatcccattcatggttgcagcatactggccaatgtatttccggacacggtcgttgaagatgtctaaggcaacttgggcatcttcattgccttcagcagcagctgattcaatgtcacgcatgtcactggaaacaccagacaagcctttaaggccagattcgttgtttaagatacggaccatttcattgatgtcggcaattccttctttgcgcatgataaatggcaacaaggatgggtcaatgtcccctgaccgggttcccatggtaacaccagctagtggagtgaatcccatagaagtatcaacggacttgcccccgtccacagctgtaatggaggcaccgttccccaagtgggctgtcacaattttcaaatcttcaatcggctggcctatgatttcagctgcccggttagaaacatagcggtgactagttccatgagcaccataccgtctagcattgtgtttttcatagtattgcattggaatactgtagaggtagtttttcttcggcatagaagtgtggaaagaagtgtcaaaaacagccacgctagtaatatcaggcaagactttcttgaaagccttgatcccggtagcattagcaggattgtggaggggggcaaattctgccaagtcttcgatagcttggatcacatcatcatcgatcaaggtagattcgctgaatttttcaccaccagcaacgacacggtgcccgacaccggttatttcatcaaaactttcaatgatatttaactctgtcaactgttccaagagcatttcaaccgcaacttcgtggtcttggatatcggctgtggtttcatacttttggccatctccgtatttaatcgtgaaaatggaatcaggtaggccgatccgttcaacgataccggaagcgacaaccacttcgtctggcatttcaaatagcttccattttagactagaacttcctgcattaattgaaatcgtttttgacatgtatttcttctctcctttaaaattacttaaactcttcccggtaccaaagatgaatatcagctaaaaagtctttcatggcttcagcttggttgaattctggtgcagttgccaaaagaacttcctcagcttgtttcgaatctttggaatgtttttgcagtattactatcgattttcttgcctcttcattttgaaacatggccttgtttaaatgaatcattccctgaaggtagccatgtttttggatgaattggagtaagtctttaccttcttggctttcaaacaaattgtaggggacaataaaataggccaaagcccccatgcttttaaatagtgaaaagcttgttcaatcaagagatggtgggagtaagaatgcccctccctattagccgtctcaaatttctgggcgtgttggtctaagggataataaccaacaggcaaatcgctcaccatgacatccactgggtcgattaacaagttttgcagactatcgccatggacaagttgggcttgaatatcttgcaaggcggacagcattgacgctaaagaaatgagtaattcatcgttgtccacaccagtgatatggatcttccgcccatccttgtttaaaaagtgataaatggtccagattagattccccgtcccgattgacaagtcgcctagtgacaggttcgatctcgggtctgttaagacttcgattaggtaagcgataaaactggcgatcgaatctggtgtcatttggtggttgacctggacatagtcttcccgcatccccttgatgagggctagctgaaaggcttggcggatttcctctgcctcaaagtcttccaggttaatctttgcataaagctcttccaggtcttttttgatcgactcagtcgggtagccatccctgacaaggacctggccatggtctaggaggttctcccctgtttccagcaaggactctaagtaggaaaattcagacccactttgaagtaaggcaatggactggtcgacttgcataaaaagctcctgacttttttgggtcaagcaagcatcatcctttcaatttgtgaaatgataagatgcgaacgctttaattgtagacgattccgatcacaatctcaagttaaatgctaaagaaaaagagcagtgcttgccactgctcttttaaattagttagcgactggataaacagatacttgttttttgcttcgtcccttgcgttcaaatttaacaacgccatcaactttagcaaacaaggtatcgtcgccaccacgaccaacattgttaccagggtaaatcttggtcccacgctgacggaagataatagatccgccagttacggtttggccgtcaccagctttagcacctaagcgtttggcttcggaatcacgaccgttagtagttgaaccgccaccctttttcttagagaagaattgtaagtcaattttcaacatgatttccacctccaggattgtttgtatttttgttaacttttaggtattcaccataattctcttcaattccctgcaggcctaacagtaagtggtttaaaagaagttgacagtctgggttatcccaagactggctgaaatcagcctttaaatagcccccttcttggtcagcctggtttaggttaaagtctactccaaccagggcttctatactgtttaagctggtaaaagatagggccgatacagctgaacaaacaatatctttacctgactcatcgaaatcagcatggccttgcaaggtgaaagaaaggatctttccttcagggttgaagtcaaattgggcttggatcatggtaagttcctattaagccttgatcgattgaactgttaatttagtgtaaggttgacggtggccaactttacggtgggagtctttacgacgcaagtagcggtaggttgtgacctttttaccccgtccttgtttttcaatcttggcttctacgctagctccgtcgacaaagggttcgcccactttggttgagtcaccgccaaggagtaagacttggtcaaaagtcacagtgtcacctgcttgaccatctaatttttcaacaaaaatttcttggccttcttcaactttcaattgcttaccaccggtttgaataattgcatacatcgtgttgcacctcctaaaatattttgggcaagggtttaaagtctatttgccctactcagactcgccgtcataagtggctcaaagcacttgtactcatgaacgagcggttgtagctgtggtgcacacaaatacaacaggcatattataccagtctcttgtctagccgtcaatttaaaatagcaaaaattaggaccctgactttaggtccaaaatacttcgtcctattcttctacaaaatcatcataggaaggaagctggttcaccacccggtcaatgccaggcctaattttttggatttggtctaccgaagcaacctcaatctgtcctctgtccgttatgtagtaactcctaggagtataagtcgatttatcatctaagaggtggtcaatcgagtaggaggccttggcaatccggagttcagacttatcggaaaaagttcccgtaatgaccgcctcttggtcaccgtccacaccggcatgggcaatgccttctaaacgaccaatgataaaaatattcccccctgctctaaggtagccagctgggggggtatcgcccaccaagaggatatctccatctacttctagaatttccccaggcagaaccgatctgaactcaacttgcaggctaacctttttgtgccaagcaacagctctttcatgactcatcacgttactagtaaaggaaacctcccattgggcccgccgttggattaaagcttgaacttcagtccgccatgattcgggcaggattcggttggggctttcaatgactagcttggcttggtccttgtcacggtcaacattaatcagttggttggtaaaaagtttcacttcttcaaataggtccgctaggctagcgtcttgtgacaaaatcagccggtaagcattgctcgaagcctttaattttatgtgtttcactcaagctaaccccctttttattcttcaattcttttcattatctcggtcaaaattggtattaaaacaagtaaaaagatgatattcaaaataaggctggcccctacgtggttggcccaaaagtaagcataagtcgactggaccaagccaatcacattaaagaccgaaaaagcaaagaattcattcagtaaaagcatcaaaatccctaaaaacaaataagccacccaacctggttggaaataagttttcaattggataatgatgtaagcaattaagcaaaaagaggccaagtaaacacccaagatgccggaatagtaagaatcatacaagaggccaaaaagaatcgccaaaatggctaggactttccccggcaaatggaaggaaaaaaagatgaggccaagcagggtcaagcgaggcactgcatagccgaaactaaattgtagggtattgttaaaaaaggctgcgagcaggccatccaacaagaaaaaaaccaacaagcttagaaagggaaataggtaggtcttccacttttccatcctatccttcctcgctttcttgggcttgatcagggtctgcttcctccgagttatcctggtctgcatcgtcttccaggttgtctagatcttcttcatcttccggattttcttggtctgcttcatcttcagggaagatgcttttagcttgccggtcaatgaccgttacaaacttggtggtattgaaattggtttccggttcaatgtggacaatgtggcctaagccctggttgtctagggctacttctgtcacccgcccaatcactaagccactagggaataagccacccaagcccgatgttgtcaccaagtctccttcttcaatcccttcatcggaagtgatttgggtcatcaagagctcattatcgtccactaggtagtccgatacaaccccgtagatggcttcatcttcagcttcttcagatacaatttgggctgagacccggttggaagtcgcttcaatattggtgatcagggtcaccttgctagaggcttggttaacttcagtaatgacccccaacagaccgttctggctcatggccgccatattttgactgatcccatctgatgagccaacgtcaataattaaattatcaacccagcggtcggggttgcgggagatgacattagctgacagagtggtgtagtcactcaggctttcgtccaagtttagctcctcttttaactgctcgttttcttctcttaaattgtttatttctgcatctttttcgtaaacttggtccacctgtcttcttaaggcttggttttcttcaaaagcattttcaatgtcttctaccgaatcaaaggcagtcgttatggcattggtcggtttggagaaggcctggccaaaaaaaagccgtgacatcattaccaaagccttggataggaccactagcagaactatttaaagacaaggttatcaaagaaataaaaacgataaccccaatcaagagtccgattaattttttgtttgtgaaaaaacgattcataacttgcacctcgtatttttaacctttaaccattttatcacacgcaggtgtaaaatcgaacataaatattcaaatcgtctgatagaatgaagaaaagtaaaaacctcttctttttccttgccataactaaaagattgattggtcatggttcatctagccctaaaaatcccattaaaaaaggacggagtttaaccccgtccggatagtctgatgaattattgtgcttgtttgttaacgttagcagcttgtgggccacgagcgccttcttcaatctcaaaagttacttcttgaccttcttctaaggttttgaatccttcgtcattaatagctgaaaagtgaacaaagacgtcatcagcaccttcacgttcaataaagccaaaacctttttctgcattaaaccattttactcttccattttccatggatcatttcctcctcgtgctagggtacttgatattaacattcttgctaaagctcgatttggaaatacaattcacaaaacgctaacttaaaacaaaatgctaaaatcatattagcatgtttcctatgagaagacaagacaaagtcccattaaatatcacgggtaactaaaccgttttcttaaagagacccataatcaccttgagttcaatattttcccgcctagaccattttctaaaaaagcttgatcttgctttcacttgcggttaaacttattattggaaaaatcatttcgaggaaggatgtttgtcaaatgagtctgcaaaaatggactgatcaaataccagaaatcactaaaatcgggaactaccagcccctcttctgggtaaatgataactatgaaggggtcatagccgccaataaaaagtcctcttattcaatggatgatatcgaagatgcctcggcaagattggaccgttttgctgcttattttgcaaagtattttcctgagacccaagataatgatggaatcattgagtctgaactaactgccattccccatatgaagggctttttagaagactactatgatgttcagatccaaggtgacctttacttaaagcgggatgacacccttcccattgccggtaccatcaaagcaagaggggccatttacgaggttcttaaacatgccgaagacttagccttggaacaagggatcttaaccagttatgaggatgactacaccaagtttggcagtcaatcattcaaaaacttctttgctgattacaaggttatggtaggaactacgggcaacctgggtatcagcgtgggtgttatggctgcagctttaggctttgatgtgaccatccatatgtctgacgaagccaaagaatggaagaaaaaccacttgcgagaaaaaggggtgaccgttgttgaacacaagactaactttaccgaagcggtccaacacggccgggtccaatcccaagcagaccctcaatcttacttcgtagacgatgaacactccgtcgacctctttttgggctacacagttgctgccctccgcttacaaaagcaattagaggaagctggtattcccgttgacgccgaccaccccctctttatctactccccttgtggcattgggggcagtccgggcggagtcaacttcggcctcaagcaagtttttggtgaccatgtccattccttcttcgcccaacccacccatatgccttctatgctagtgggacttttgactaaggaatatgataaggtatcagttgcagactttggcatcgatgccaagaccaatatggacggtctggcagttcctagaacttccggttttgtggcggaactcatgcaccactactttaatggtggcttaacagtttcagaagaagaccaaaaagccctcttaagcaaaatgattgacttggaagacattcacctggaaccggctgccctagctggtctgcctggtccggcctacctcttctctagccaagaaggccaaacctacctagaccaaaacaatttactggataaaatggcccaagctaaccatatcgcctgggcaactgggggtagcatggttccaaaagaagagatgaaggccttctaccagaaaggtttagcctatttataaaccactaaaaaaccacaagagaaccggccagaaccggttctctaatttatcagaggtatccttcccccctcattgagcaaaaagaatcttcccccactataatatggtcaagcaattgaatcccgattaagtcacctgcttcttccatcctcctggtgaaagcaatatcagcttgggagggttccggattgccactagggtggttgtgaccaataatgatgctggctgctgaagaccggataccgatccggaagatctcccggggatgggcaatactattggttaaggaccccttaaagactaactcctgcttgataatttggtttttagtattcaaatacaaggccagaacattttcctggtgaagtccgccaatttcgtcaatcatatactggcccacccattggctagagttaacagtagctcccttagccgatttggaccggtagatccgcttgcccagctcaatagcagccaaaacttccactgccttggaagggccaatccctttgatagcagtcaactcttccatggagatgaccttcaattccgaaaggtcccccacccggtctaaaacctgcatggccaagtggatgacatcaaactccttggtccctgtccttaaaaggatggccagaagttcttggttggacaaggcattagccccacactcctttagacgttctctaggtttaacatggtctggcatgacattaaaaagtgtttttgacataataaaagtcctttctctggtcttactataagatacgcaaagaaaggacttttttatttttttatttaaaatattttataacttgtcttaaattttcttcaatggctagacttttcgatttggcttccggcccaggctggattaggtcgggaatcataatggtggctaagccggctgcatgaccagcccggaccccgttcaaggagtcttctaagaccaaagtttcatccttgcttgttcctagcttgtctagggccatcaggaaaatatctggctcaggtttggtctggtctacttcatcgcctccaaccaagtcgacaaagtagtccttgaccccattgatggtgactaccttgtccaccaaccatttatctgagctggaagcaacgaccatcttaatcctctctttttgcaagtagtctaagaggtccattaagccttcttttttagggacctggtcagaggttaagaggtcataaacatctttttgagattcttccataaagcggtcaaccttgtctttctcttcaaaatggtcgtacatggcttggaagaagtcacgctcgctccccccaacatggtccagatagaagtccttgctaaagtttaaaccgacccggtcagctgttttttggttggcctggaaataaatagtttcggtatcaaacatcaatccatccatgtcaaaaatgactgctttaaaatctgtcatcctaaccctctttcatttctctcatattgcttaattggtctttgaccgcttcataccgctcttggtactggacccccttgtctctttcctcttggacaattttttcgggcgcgttattgacaaatttctcattggcaagtttgccctctacccggtcgatttcgccttgccacttagcaagttctttctccaggcgggcaatttcttggtcaaaatcaaccaagccagctagggggataaaaatttcaacccctgaagcgacagccgacttcacttctttagggacttgtggatcttgaccgatctccaagttatcggggttacagaagcggtggataaaggactggttggctcttaagaagtcttccacttggtcatccttggccttgatcaacaggtcaattccttgcgacaagggccggtttgattcagcccggatcgaccggacagcttggattaaatcaatcaaggtactcatattggaaatggcttctgggttactgaactggccatctgcctcaggataaggagcggtcacaatcgaattcccttggtgggggacatgttggtagatctcttcggtcacaaaaggcatgaaggggtggagaagtcgcaatatggcattcaagacataggctaagacacttttggccatgtctttttggtcaggactgccttcatccaagatttccttggtcatttcaatataccaatcacagtagtcatcccaaatgaagtgatagagagccttgcctgccagagagaattcaaacttatcggcatggtcgttaaccacggcgatggtttcatggagccgggccaagatccactggtcagccacagtctggtctccagcaaggtcaatgtcttggtaggccatatcccctaggtttaagatcacgtatcgggaagcattccagatcttattgataaaattccaagccgcatccattttttcgtatgagaagcggatgtcttggcctggggtcgacccattggtgaggaaccaacgcaaggaatcggcaccatactggtcaatcacgtccatcgggtcaataccgttgcccaaggacttggacattttttggccatcttcagcccgaatcaaaccgtggatcaggacatgttcaaagggacggcggccagtaaattcaagagactgaaagatcatccgggcaacccagaagaagataatgtcataaccagtcactagggtattggttgggaagtaacgtttaaaggttggattgtcttcttccggccagcccatggtcgaaaaaggccaaagagctgaactgaaccaggtgtccaagacatcgggatcctggtcccaattttcactatcttctggtgcctcttcgcctacataaacttcttccgtttctttgtggtaccaagcaggaatttggtggccccaccaaagttgtcttgaaataacccagtcatgaacattttccatccagtcggtaaaggttttctcaaaccggcctggaacaaagtcgaccttatcgtctgttttttggttggccaaggcccggtcagccaagccgtccatcttaacaaaccactgggtggacaagcggggttccacaactgcatctgaccgctccgagtggccgacactgtgggtgtagtcttctactttcaccaggttgccttggtcttttaagtcagcaacaacctgcttgcgggcatcaaaccggtctaagccttggtaggctcctgcattttcattcatagtcccgtcagcattcatgacattaatacgttcaaggtcatgacggtttccaatctcaaagtcatttgggtcatgggctggggtcaccttgacgaccccagttccaaattccatatcaacatagcggtctgcgacaatcggaatttcccggcccagcaaaggcagggtcagggacttgccaatgtaagattggtaacgttcatcatcggggtggacagcgaccccgctatcacctagcatagtttccggccgtgtagtggcaatctcaacctggcctgacccatcagagagaggataggtcatgtggtagaaggcaccctggacttccttgtggatgacctcaatatcacttaaagctgtttgggcaactgggtcccagtttataatgtactcaccacggtagatcaagcccttgttgtaaaggtcgacaaagaccttgttaactgccttgttcaagccttggtcaagggtaaagcgttcatgggaatagtccactgataagccaattttagcccactggtccctgatatttttagcatattcttctttccaatcccaaacccgatcgataaaggcatcccggcctaaatcataccggcttaaaccttcttcattccggattttctcttctaccttggcttgggtcgcaatccccgcatggtccatgccggggagccagagggtatcatagccctgcatccgtttacggcggacaataatatcctgcaagctggtatcccaagcatgacctaggtggagcttgccagttacattgggtggaggaataactaccgaataggcttcaacgtccccatcggagctgggcttaaataagcccgcatctacccaatccttgtagcgtccctcctctacagcttgggggttatatttacttggcatctgacttgctttatcacttgtcatcataatccctactttctacataagtcaaacaaaataaaaactcgtcctatctttataggacgagttaaactcgcggtaccacctaacttatgccaattttggcatcgctcaaacaggttaatggcctagtgaccaggtcaggctactcacttcacccaaccaacttgtaagttacttcaaaagtccatgcaagttcccaccaaccacttgctcgctgacttgaccttctacttgtcttacgcatcgttattaaagacagtttaccatattttaacttttgtgcaaagtcagagcttataaaatagagtcaaattcttctttttcttggtcttcaaccagctgtccaggatagatagtctcaattttaagactagctaaggcctggtccattaagtcctcaatatctaaggcttgttcatagcggatggcattgtcaaccttgggcttggtctttggcttagtcggggcaaaaatggtacaacaatcctcataagggagggtggccaagtcataggtgtcaatcacccgggacaagtcaatgatttcatttttgtccatagccaccaggggtcttaagaccggggtagtggtgacagcattaatggcttgcatgctttccaaggtctgagaagccacctggcctaaagattcgcctgttataattgcctgactgccccggtcttggcgaattcggtctgtcagccggagcatcatccgtctagtgatggtcatggtgtaaccttcgggtatttgctccttgatggcctcttggatgtgggcaaaaggcacttcgataaaggtaacaggtccgccaaatttggcgatttttccagccaagtccttggccttagccaaggcttgaggcgaggtgtagggtggactgtggaagtggacagcttcaactatcataccccgtttcatggataggtagccggcaactggtgaatcaattccgcctgacagcattaaacttcccttgccagccgtcccgaccggaagtcccttggcaccaggcaaggtgtcagttgaaagataaacagcatcctgcctaaactcaacccggatctgcaagtcaggctcttccatttgggctttgaaaccgggttgggcctggataacagcagagcctaaaatccggttgagttccatggagttataaggatagtcatggtccgcccggtgggtatcaattttaaaggtcatccccggctgaaacttatcctgggctaggctagcgacctggtctttcacctggtccaagtctttccctactttaatggcaggagataggttttggataccaaagaccttttgtaagcggtccataatttcctggccttggtcaggattattaaccttgacatgcatccggtccctggaccaggtcaactcaacctggtctaagtcagcaacagcctggctaacattcgaggccaaggtttttataaagtctttaatatttttccccttggtggataattcgccgtaacggattaatatttcatcaatttgcataagaccttcctttacttgctttgtctgacgggttcaaattgctggtaaactttatctagaacccttaaaaattcatcaacttcttctaggttattatcaaaagataaactgatccggacagccgtttgcgcatggcccggcttcactcccatagctaggagggtggaagactctcggtttgaccggctagagcaagccgaagtcgtggacaggtagatatcttcttcctcaaaggcatggaccgtcacttcccccctgacattctgaatgccaaaggtcaagatatggggcgccccctcttgtggggaaaataggtcaatatcgggatatttgactagtcccttcaggagtttgtcccggagtttcggaagttgactttggcctgcttggtctgtgaccatccgcaaggccttagccatggcaacgatagccggtaggttttctgtcccacttcttttatttccttcctgtccgcctccttcaactaaaggggtcaagttcttaccggacttcacgtagacgaagcccactcctcttggaccgtggaatttatggccagagaagacagccatgtcgaccctgctctcctctcctaggtgaaggtcaacctggcccactgtttgcacagcatccaggtggaagtggacactcggatagtcttttaggatctctgaaatagcttcaatgggctggacaacccccatttcattgttcacagctataagggagaggaggatggtatccggacgcaaggcatctttgagttcttctaggtcaatgtaacctttttggtcgacattcaaataagtaacttcaaatccctggtcctctagctctttcatggtgttcatgactgccgggtgttcaatcttagaagtaatcaggtgcttgccgtagaaagacttcgctcgggcagtccccttgatgacccagttgtccccttcagaccctccggaagtaaagtaaatttctgaaggcataacccccataattttggcaatttggtagcgggcttggttcaagagcttggaagctgtctcccccaactggtgcaagctggaggggttgccaaagtaatgttgactaaccttcacataagactccaaggcttgaggataaatgggggttgtagcactgttatcaaagtagatcatttgcctctcctttctttaaaactgctattgttaatctgaccggactactcggcttccactaaggcaaaaggaccccaaataaaagctagctttggagtcctgcttgataaatacttattggtcttctttgtaatcgtcttggatagactggactaggtcaggatttatttgactgagtttgttgcggacaaccatataggaagactcgtagtcatagtcctcattgaaaagtttctcactctgggcgatggcctggtccacatccccttcttggtccttgtactggtaaagcttctgggccattaattcagttaaattagcatgggccaagagcttttcggtctcttggtctaacttgttaacctcttcctggcaaattcggattaagtcatggattttttcgacttttaaccggggccggtttaactcttcagacaagcttggccaagagtttcattacataggtatagtactcactgtagctagccggaacaccgggtaagttttcccggaggatccggcgccgaagccccttagccttcctttccattttgttgagctggtccttcaattgaacttcttcatctcggtagccatatagctggtcagtcacagcattcttgacatcatttaaggaaatcagttcagacttgatgaaattgaggtttttaagagcttcggaataggccgtgaagttattgtctaggttatcgacaatcttgtcaaacttgccttctaggaactcaactgaatctcttaactcgcggatttggtctgcttcattgtgtattaggacatagctttgggacacccggtcaatttcaaaaaagaggacccggacttcttcccttaagtaatataaggctttttggaccgatggaatcaactggtcactttcatttttagcagaaatttcgacttccattctttcatagatctggtctatatccaaggaaatggtctccgctaattccttggcctgggcaagttgcagaccaccaattaactggtctagttcttggatcctgtcttcgacagactccacttcctggggaataggaggcccattaaaaacaaagccctcattgatgagctggtcaaaagaagactcaatttcttctatttgagggtaaaagtcctggttgatttggtcaatgattttagggatatcatccaggtaggcctgcatctcttccaacatgtcgtggaggtgcaagataacggaccgacccgtcttcatggtcaccccaactggttaccttgtcaaaatgcttgaattcttcttccatatccgctaacttatcctccaaggcgtcaacagcttggccataccacaaggaattttcaagtaagtttttccggactccttcataagacttttcaatctcatttattcggtgggcattggcttcttctcgattgataagctcttctaaggagtcagataatttcaccatgtccccctcgatagcttctagttcctggtgggctaaatcttgctggtccttggtctgcttaaagtggtagcgttcattcatctgctcggcttggaagagatggttctcaaccgtaatattccttccagccaaaatgtcttcccacatgtcttccaagctatcggcatagtcttgagaccggccactgatgtccatttgacggaccttctctaaacgctgggtgggcaagccttccatgagagccttttgtcggtcttttaattccacaatgttattataattttgtcgctttaaaataaaaaaaccaataaaggccactaggataaccaaaagcactaaaatgatagtgagttcgataggcatgtttttcctccgttcaagctagttaaaaactagaaatttatactctaaactagtatatcaaaaatgtagcaagtatgttatactgttcttaatttttacattaatctgcccagaaagttggtgaaaaagtgtctgatccaaaatctatcttaaaaaaactccaggaccttatccggggtgaaagtgactttgtctccattctcagtaataccagtgcccttttataccaggacttgcccaatgttaactggttaggtttctatctttggcaggaagacgagcaagaactcctagtcggacccttccagggcaaggtagcttgctaccgaataaaaaccaagcagggtgtctgcggcacggcctttagtcggaaaaccagcatccgggtggcaaatgtccaccaatttccgggccatattgcctgtgacccagattctaagtcagaattagtggtccccttaacgcggaagggtgaagtcatcggggttatcgatattgactcggcccaagtcaaccgctttagccaggaagaccaagaattagtggaagcttgtgccaaaattttggacccctacttgtaaagcatgagtcaagcttcccgacgaacccaaaagatgacttccagacaagtaagcaaagtgaaagcccgcagcttgaaaactgcgggctttttgctttgccaaataatccttaacggttgtagaactcaacaaccaaggattcttcaatttcttgtggcatttcttcacgtaatggcaaccgggtcaagctaccttctaacttatcttcatcgaaagtcaaaaagtccggtctaccgtaaagagattcaactgattcggtaataacggaaaggtcttttgaactttctttaacgccaatgacttgaccaacttcaactgagtaagacgggatatctacccgtttgccgtcaactgtaatgtggccgtggacgaccaattggcgggcttggcgccgagttgaagcaagacctagacggtagacgatgttgtctaaacgtcgctcaagcaagatcataaaattggtaccctgtttaccttcacggattttgcctgacttattgaacaagttcaagaattgtcgttcgttcattccatagagataacgtaatttttgtttttctttcaattgtaagccgtattctgacaacttgttacggctagttgggccgtgttgacctggtgcgtaaggtcttcttgctaattcttttccggttcctgaaagggaaattcccaaacgacgggatttcttccaggaaggtcctgtatatcttgacatgctaattcctccaataaaatgttttggagtaaaataagagtatggaagtcagtggtcgtacatttccttttaattttcacttattgcagccgctagctactcattcgcacatcttgtgcaaggaactgttgacggctccacccttcctcgctgcattattttacacaaaatctatcataccttataatcctgctagtgtcaattcttttccctttaaaaatcaagatttaccggtctaatttaaaataacagtctagactttgcttgtataggggtaaaatcttgtcgaaagtttccttaatgtaatcttcttgaccttggtcatcttctaacaagggactgtctggtctaatgattctcccaagcatgatttctccttttttaacgttaaccaagcggtccacagtctcctccatattgtcttgattgaggtcaagaaggtctgttttcgtgtggtcttgggagatataaaagtctccgcttaaattctgccagtgattcggattagcttgaaattcctggccaatttcttttctatattttgggttgtcgatcaaagctagaccgataaaaatatggtcagcgttgatttgaacttgaaggtgggggtatttcttatagcctcggttattgccaccaaaggcacaccaagtcgcttctggggggttaacagtacgtcttaagtgttgggcaatatgaaagcccaggttacgtccagtagagttattaatatagtcttgaaattccccttgtaggccttggaagatgggttggatctgagaccgtatctggtccatccggtcatccaatccttgaacctgaaaaatatcaaacatctcttgcttaaataattccatgttttcacctctttaacttgattatagcaaagacctgaacattttaccgaatcgtcattccaattagggccgaaagacgaaaattttattctgtcattttataaaatattctttgaataaagtaaacttaatttttaggtaattaaaggttaagccgtctgaattgttataaaccttatctcttaagcccttacaataaaagacaggacttaaccttattctaatttacatttgtggaagcgggcaataatggtataataattccgtagttttattttaaggaggaaatattttatgataattggtgtacctaaggaaattaagaatctagaaaatcgtgttgccttaacaccagataacgttaaggttttagtagatgatggtcacactgtcttggtccaaagccaggctggtgtaggttcaaactttaatgaccaggcctatgaagaagctggggcaaaaattgaaaccagcccagctgatgtctggaaagcccaaatggtcgtcaaggttaaagagcctcaagaagaagaatacgactacttctacgatggcctcatcctatttacctaccttcacctagctaatgaagaaaaattaaccaaagttttagcggacaaaggtgtcactgctattgcttatgaaaccatggttaaaaacggcaaactccctctcctgaccccaatgagtgaggttgcaggtaagatggcggttcaagccgggaccaaattcctggaaaaaatcaacggtgggaaaggggtccttatcggtgctgttccaactgttaaacggtcaaaagttgggattatcggtgggggtgtcgttggtgaaaatgctgctaaagttgcccatgggatgggggctagcgtgaccatcttagacttaaaccctgaacgcttgtcggaactagacaacatctttaacggtcaagtcgaaacccttatctctaacccaactactattgccaacaccgttaaagaatcagaccttattattaccggggtccttgtcccaggtgctaaagcgccagtcctcataaccgaagaaatggttaaatcaatggatgaagggtcagttatcgtggacattgcgattgaccaaggtggaaatgtggaaacttcaactcaccctaccctacacagtgacccagtttacatcaaacatggggtcatccactacgctgttgctaacatccctggtgccgttcctcgaacttctaccattgccctaaccaactctaccctgcaatatgcccgtcacttggctaatgacggaatccaagcggctaaagaagatcaaaccatttatactggtgtcaatgtctatcaaggtaaagtaacaaacgaggctgtggcccatgcctttgatttggaatacactgaattaaaccgattgctcgattaatctaattgataaagacctttaaaaaagcgatcagacttttgtctgatcgctttttttagcttcattatctggaaaaacgctattagaattcaagtctagtcaaagacaactgaaacttcttctatcatttgggctaaggcctgggtcccaccttcactgagataccaaacgtctggtgtcaagtagacaatattgtcattttggtaggcgtctgtttcttgtatcagtgggttgtcggaaaattcaccagcctcttggtcgcccccgatagctgctgtccggtcaataacaaaaatcaaatccgggttttggtcaaccacgtattcataagagacgtccatcccgtgacgggaagcttcaattccagtgtcaactggttcaaagccaaacaaatcatgaacaaagctgtagcgtgaaccactaccaaaagctgacaaggctccttcgttggtcatcaagaccagggtggataaatcagaggcttcattttgctcttgtaggtcagacagggaggcttccaagtcactttcaattgcacttgcttcatcctctaggttaaaaatttccccgtataaactaaggttttcttgaatagaagcccacaagtcaccgtcagcatctgacatatccaaggtcggggccacttgactaaccgcatcatagttatcactagaccgtctagcgacaatagctaagtcgggttcttcggcattggcgatctccaagtcaatttcatgcaaggtcccagccaccggtaagtcagcaaactcttgcaggtggtcaggcaaattatcggttgcggttgcgacaacccggtcagctaaacccaggtcctggaggatgtctaactggccgttgtcaaagacagctagccgttctggatcagatggcaaactgacttggtggcctagggggtcagtcacttccaattgggcctggtctccttcatcttgaccgccttcactttcttcattttcttggtcttcccctggatcttcagcctggccatctttgtcttggttcatctcttcttggctgtcttctacttggctactatcctcttggtccggttctggagcttcctggtcattttggcaggcagctagggttaaacttgataataatgataggtaaattaattttttcataatatcctcctagtcatagtaaagaatgacttttttattgtttctttcgatgatttcaatatccatgttaaagagttggtccaagttttccttggtcaagacctggtcagtggggccggacttgaagagttggccgtctttcatggcaataatattgtcggcataagtagccgcaaagttaacgtcgtggataactgtgataatagtcttacctaggtcatcgactaacttccgtaaggtcttcatcatggcaacaccgtgggtcatatccaagttattcaagggttcgtccagtaagatatagtctgtatcctggcacaagaccatggcaatcaaggcccgttgcaactgaccaccagacaaggtatcaatatattggtcttttaattcttttaagtttaggtaggtcaaggccttattgaccttatcccagcagttggcatttaaccgacccttggtataaggaaatcgaccaaaacaaacaagttcgctgacggttaggcggacattcatgttattggtttgcttcaagaaagccaaacgtttagctaggtcattttgcttaaaggaattgacctcagacccgtctatgataacggaacccgaatctctaggaatgagtcggctgataatctctaaaagagtactcttgccggccccatttggaccaatacaggcggtcatttttcctttttcaatgggaagggttacatccgatacgacagttttttcaccaaaagttttgctgacatggttcaaatccatcatgatacttgcttcctttctttaataataaggtataagaaatagatgccaccgatcagttcaatcacaacaccaatcgaggtgcgaacaggcaagaggtgttccactataaactggctggcaagcaacaaaagaacagtaatgaaagatgcggttaaaaacagccaggtgtgatggtaggaaggcatgattcggtaggccaagttagctcctaaaaagccaaggaaagtgatgggacccactaaggctgtggaaacagccgttaaaatactgaccaagataaataagtaaaaatattcccggtcgacatagacacctaaacccttggcatagacatcccccaaatgcaagacatccaaggtatgggagtgaaaaaataagtaaatcacaattggagctacaatgaccaggctgagccagatcagtgaagaatcgaccgtgttaaagctaaccaaggtccgggaaagaatagtctggaattcattggggtcaatcaaggcttggaagaagacaattaagttacgcatcaaggtcccaaaaatcaaaccggtcatcaggaggaggaaaatccggcctgggtaaagtttgaaaaagatgtagaacaagccgaatgaggctaccaccatcaagacagtactgatgataaaattcagctggctagaccggcctagcaagtgacctgacccaaaaaagaagatgatcagggtttggaacaaactatacaggctatctagtccgatgatattgggacttaagatattattttttgctatggtctggaaaactacggtcgctaccgccgtggcaagacctaccaaggcaaagacaggtaagcggctgacccttaaatttaaggcgaaggccaggttgccccgggtattgtagaacaagtaaaggacagttaaaataaggactgacaagcctaaccagaccaagtgcaggtatggcttcttattttgcaagcttacgctcacccctcaaaagtaagaataaaaataggatgcttcccgagactccaaccacgacagaaattggcagttcatatggggctatgactatccttgctaagatatcacaaacgatggtaaaaactgacccaaaaattgccgttggtaggagcattttctggaagttatcccctcctttcaatgagatcaggttgggcacaataatgccaataaaggggatggacccaacagtcaaaaggactgcagtggtcccaagggcaactaacaagatcccaaccagttcaatcactcggtaggacacccctaactcggtggccatttcctggcccaaagccattactgtaaagtaatgagcaaacaagtaaatcaaaataaaaaccggaagagctaggaagattaattggtaattatctgaagtcaccagggaaaaatttccttgaaaccaggagttggcattttgaacgaggtcataacgcaaggctatgtaggaaccaacagagctgacgatattgccaaacatcatcccgaccaagggcaccatcatcgacttattccgcttgaccgttcgcaagaagagaagaaagatcaaggtccctaaactggcacaaacaaaggcaaagaggatgcgctggaagtatgtagctccagcaaaaatcaccatggataaaatggctccaaaccgggccgatgccatagtcccagctgttgtgggtgagacaaacttattctgggttaacttttgcatcaataatcctgccactgacaagctagcccctgctaaaaccaagctaatggtccgaggcagccgggtcgttaaaaggacttttacctgcaagtcatctaaagacagtaaatggttgacgcctaagtcatggaccccaacaaataaggaaacaaaagataggaccaagactagggcaatcccaataagcggcaggtagctgggctttcttctttcatccaacaccagtcttcctttcttttaattgaaaacgattatcattatctatacatgtattgtaacgaacaatcttttttttggcaataataaaaactaaaataacttgattttatgtaaaaaaatccagtttactattaataaaagcaataaaagaaggatagtaaattactatccttctttatattattctaattaactaggtcattggagggtcaaaaatctagaccaatccttgggctaacatggcttggaagaccttgtcagcaccagcaatattggctcccaagataaggttcttgtcatccccataatctttggcggcctggctacaagcctggtaaatatcctgcataatgacttgcaagttttggtcaacctggtcaaaggtccaagacaggcgctgggagttttgggacatctctaaggctgacacagctaccccaccagcattggctgccttgccggggcaaacaatgatgtcatgatcaagcaagacctccaggccgtctttaaccaccggcatattggccccttctgcaagtaaaaagacgccagatcttgcaatatttttagcttgagactttgaaatttcgttttgggttgcacaaggaagggcaatatcataattgatatccaaatcccatactgattccccttggacgtacttggcttgccccccttttcttttatactctgctagggtattgttagggttacttttaatagcaatgacttggtcaacgtcaatcccatcagggtcatacaagtagccacctcggtcagaacaagctaggactaagccgccaaaatcttgggcttttttgatcgcatggccagccacattgcctgaccccgaaaccacaatccgcttgccctctagtgagtctccgcgatcttttaagaggtcatccacaaaataaaccaggccatacccagtcgcttcagtccggccgacactcccaccaaaggtcaaaggcttaccagtgtaaaccccaggtgtaatctctcttaaccgtttgtactgaccgtacatataagatatctctcgcttgctaacccctacgtctccagcaggcacatcataatcaggaccaatatatttttgtagttcagttacaaagctttggcaaaagcgcatgatctcattatcagacttgcctttggggttaaagtcagacccacccttacctcctccaatcggaagattagttaagctatttttaaagatctgttcaaaggctaaaaaccggataacactttcattcacgctgggatcaaagcgtagccctcccttgtagggaccgatagcggaattaaactggacacgaagtccttcattgacccgccaattgccttggtcatcttgccaaggtacacggaacttaatgacccgctctggctcaaccaaaagctccaaaaggttatggtcttggacttccggatgttggtctaagtatttttccaaggaggttaaaacgtctgtcacagcctggttaaattcttctttttccgggtgcttggccttaactttatcaatcacttgttggatatattctttgcttgattccatacacatgctccttttctataacttaaactcattttacttagtatcttcatgcttcgccaaggcttccgctagctcaataaccagccttgctgaggccttaccagcttggtcaataaattcctcaaaatcaaggctagcctcttcatcagccgtatcggataagcagcggataatgaggtagtcaacatcaaaattgtaacaggtttgggccacagccgccccttccatttcagtcactaaggccttggggaagtggcttttaacttgcttaacctggtccttactagccacaaatgaatcccctgtcaccaccaagcctgaccgggtgtgccagcctaatttttggcccaggtcttgagccagcttggaaaattccggtttgacttcataaacggctggcatttgaggcagctggccataagcgtaatcaaatacccggttgtccacatcatagtaggccacttggtctgaaattaccaggtccccgatggaaaggtttgagccaatccctccagctgaaccggtgttgataataaagtctgcctgaaagtgactgatcaatatagaagtggcgatagccgcattcaccttgccaataccggattggactaaaacaactgggcttgaccctagcaagccttggtaaaagtctaagtgacctaaatttatcttggtcaggtcttttattgcttcaattaataacctagcttcctggtccatagcagcgataagccctattttcacttgacttccccttcctaaataaagaatgtgaacaataaaacaatgaccaaagctaaggaaaccgcgataatggctaagtttagccggtgttccacttttcggtaacggtcccgctcacttaaccggctcttcttggtcttgccttgcttggctaactttctctcttcacggaagtcagtccaagcctgctttattttttttagattgatcttcattttaccttgactgccttcatttttcatctaatcacccttagccaactttaattgccaatagtagagggcaaaaatagtcttggaatcatttatcaagccttggtctaccaaatcccaggcctggtcataagacagtttaaccacttcaataaattcatcaggatcctgatccaatggctcttcaacttgggtcaaatgctcactttcatagaggtaaagcttctcattggtgaaaccaggagagttataaaattcagtgacatggctgaggtccgaagcccggtagcccgtttcttcttctagctcccgtaaggcagcctggccagctgtctccccctcttcgattaaaccacaaggaagctcaaccgagacttgctcaatgggcttgcggtattgtttcacacaaatcaatttgtcatcttcaaaggccaaaatccccgctgcatcaccgtgccagacaatttcccggctggctttttgaccgttggggagttcaaccgtaaagacttcatattcggtgatattccccttgtaaattttttggcgcttgattgttttttcttcaaaatccattttatccctcactcatctatcataatcgcttgcagcaattttataaatactgctttagtccaattcctactttagcacagatgtggtaaactaactataagaatatgcctttcttaggaggatgaccatgacccgagcccagaaattttcaagttattttttaactggactgacctttttacttgtactcggagcggctcttgacgaattcaatagtctcttgtccctcattatagcggttttagctgcaattggagcttattttttactcaaaaatttttttcaaaaggatgaccagtcaccccaggttcccaaattatccaaggataaggaagctttttaccggtctaagggcttgctacctgatgatatcaagttttttagacaaaccatgcagaccagcaaaaagcatatcctagctattgaaaagcaaataaatgcttcgaacaagctgaaagcaattgaaaaacgccacaatacaattgagatcaccaagtctttgtttaaagatattgtcaaagaacccgatcgtatccaccaagtggaccaattcttgtatatccacctcccctccttggatgatatgacccgtaagtttgtcaagattgaaggacacactgccaaaagcaaggcaacctttgacattctaaccaaatcagcggaaaccatcgaagacctatgccaggaaatcacccaggactacttagactttcgccaagctgacctgtcttccatccaagctagtatcgatatcactgaagacagcttagaaaaacatgaccagaccgaacaaaattcgaaaagcatccatgacactgagatctaatggagtaaggagattgaaagctcatgaatgaccaaaataataactactttgatgacttattaaacgacccctttgcgagctctgaccaggaagaagagtcacaccaagaatcagaagaaaaatccaccagcctagcccctagccaggaaggccaatcaacctttgaccaattgccggccgaccaccaggccaaggccaaggaattgtctcagaaaatttcagacaaggacatcaactctgtcctcaattatggggctgctgcccagaaaaaaataggcgatttttcccaaaatgtcttagaccatgtccaaaaccaagatactgaccatattggggagattctcaacgacctcatgtaccagctgaaagaagctgaccccaaagaattaaccgcaaaaaattctaatattttcaagcggatcttcaaaaaaattaaccggtccatttatgaaacaacagccaagtaccaaatgatcggggcccaggtggataaaattgctagcaagctagaccaagaaaaagacaaactcttgaaagacaatgagatgctcagcgaactctatgagaaaaacttagacttctatgaagccctcaatgtctatatcgcagctggcgaactcaagatggaccagataagtcaggaccaactgcctgaagccatgaaagaggctgagtcgggcaatgactccatgacggtccagcgggtcaacgacctcaaccaattccaatcccggttagaaaaacgagttcacgacttaaaaattgcccgccaactcaccatccagcaggctccccaaattcggatgatccaaaacaccaaccaaactttggcggagaaaatccaaacctctactaatactgctatccccctttggaaaaaccaggtcgtcatctcccttaccctgctccgccagcaagaggcaatcacagctccagcgacaagtctctgaaacaaccaatgaaatgcttaagaaaaattcagagatgcttaaacaatcctcgattgacactgcccgggaaaatgaacgagccgtggttgatattgaaaccctagaaaaaacccaaacagatttaattgataccttacaagaagtcctagccattcaaaaagaaggccaccaaaaacgcctagatgccgaaaaacgactctacgttatggaagaccagatgaaaaaccaactcctagacctcagtcgggaagataagatcaagcctgatgaccatgaatggtagattctaagaccatcttgcttccccctcttaaagggcttaaacttccattgtgcattaaccctagtgagggtataataagacgaggaaggagtgctagaatgattggatttatactttcactgatcattggtggtgtgattggagctttagcccaatacttcacccaaaaagatgtcccaggtggggtgatcggaaatattatcgttggttttcttgggtcttctctaggaggctggctcctaggagatttaggaccaactgttgccgattttgcgcttttaccagcagccatcggagccatcctagttgtcttgatttatgatttaattttctaatagacatacaccaaaaagagtcaccttgggtggcttttttatttggtcctgctcgctagttttagaaattctatactggcaaagccaatcaaaaaaagaatttataatagaccaaaagcaccagcctgattagactggtgcttttttgctttctggccaaaagaatcgagttcggtctaagcttataagactcttgtatgggccttttgtctaattttctaaaacttctgggtagtcagcttggacaatatcatggcaacgttggcacaagtaacccttgtcttctggtaattcataaggatcatcagtcgtgatccggcaccgagtgcaaacttcacctggcattttctctactaagacagatacgccgtcaaaatctaagatgcggtcgtcatccggtttatctgctaagtccaaaacatctaattgggagctgatcaagacgaggcgaacattgacgtccaaagaatccaataggtctcttcctgcctggtcaaggtatagggtggttttggcttcaaagtctttcccaatcaacttgttatcgcgggctacttcattagcttttaatacatggtctcggatacttaaaaattgactccacttgtcttcaagttctaaagcattttggtaattttgtcgcttcggcatatcagataattgtacgtagtcttctggctcagacaagtaggaccaaatctcttcagccgtatgggggataacaggggccagtaatttggccaagacaagtaagattttgtagaagactgtctgtactgctcggcggctttgggcatcttctgggtcgatgtacaaaatgtctttggaaatattcatatagaagttagacagggtaactgtacagaactggttaacagtcttgtaaatatcgagatagttatactcataataagcagtcaagacttggtccactaaacggtcagtctggacaagaatatactgatccaagccagacaagtcttggtagtctacttcgttgaccttgggatcaaaatcttctgtattttggattaagaagcggacagtgttacggatcttacgatagacttcagcgacttggttcaagatatcatgtgagacgcggacatcagcttctgtatcaactgagatagaccataagcggataatgtcagcacccatgtcgttggcaacatcattagggtcaatgacattcccgactgacttactcatcttgtagccttccccatctaagacaaatccttgagatagaacagccttgtaaggcgcctgaccattaacagcaaccccagtggtaatgctggagttaaaccagccccggtattggtcagagccttccaagtagaggtcggctgggtaagataggtcatctcggcccttcaagactgcttggtgggaagacccggagtcgaaccaaacatccatgatatctgtttccttggtaaattgaccgttaggactagatgggtgttcaaagccttccggaagtaagtccttagcatctctttcaaaccagacattggacccgtactctgcaatcaatgcttcaacgtggcggagggtttcttcggtcataatggctgtcccgtcttctccgtagaagattgggaggggaacaccccaagcccgttgccgggaaatgacccagtcgccccggttttcaaccatgttataaagacgtttcatcccccagtcttggatccagtcgactttttccacttcatctaagatggcttgtctaaacttgtcaatggaagcaaaccattgtggggttgcccggaaaatgaccggctttttagtccgccaatcatgagggtaggagtgggttctaaattccatatgaaggagggcattgttttcttttaagaggtcggtggacttgatattggcatcatcgtagaacaagccttcaaattctggcacttcatctgtaaagtaacccttgtcatcaattggtgataagacaggcaggtcatatttttggcagacaatatagtcatcgtccccgtgccctggagcagtgtggaccaaaccagttccgctatcgaaagtaacgtggtcaccgaggataaccagagactctcggtctaagtatgggtggaggcagataatattctccaagtcttcccctttaatggttcggacgagttcaatatcttcccagccaactttttcagagacttcatcaatcaacttggtggccactacatagttttggccctcaacttggtaaactccatactccccttcagggtggacagcaatagccaagttggaaggtagggtccaaggggtggtggtccagatcacaattttatcgccttggtcaagcactcccttgccatccttgacatcaaagctaacgtaaatactaggccctctaacatccttgtattcgatctccgcttcggccaaggctgattcactggatggtgaccagtatactggcttgagaccccggtagatgtagccttttagggccatttcactaaagactcgaatttgagcggcttcataatccttggtcaaggtcacataagggtcgtcccaacggccaagaacgcctaagcgtttaaaatcctttctttgctggttaatttggtcccaggcatagtcttcacataattttctgaattccgccacggacatggacttgcggtccaccccagacttggtcaaggctgactcaataggtaagccgtgggtatcccaacccggcacatagggggtgtagtaacctgccatggtcttgtagcggttgataatatcttttgtaattttatttaaggcgtggccgatgtgaatgttcccattggcataaggagggccatcgtgtaagataaagggctccttatccttgtttttctctagcatttgttcaaagagtttatcctcttcccactttttttggtaggccggctctttttgggataacttggcccgcattgaaaaatcagttttcaataagtttaaagtatctttaacttccatcttaaaatctccttttctataaaaaaaagacttcatccccaaggacgaaatcttcgtggtaccacctttattcgagctggtaaaaataccaactcctctccttctttaacgcagaagaacgattatggctaaatcaatctcaccacaatatgacctagatgatatacagttttgtgttaccaccagctctcaccccacctggctcgctttgattagggacaaaaccgtacctgttctaactattggtatctctatttataaaagttgttagttaaaattatatgagtaatggaaaagaaatgcaaggggggagctttagattttagtcagaatctttgcttctttcatctttatctttttgatcctcttcctggccagccggtatttcctgggctggtctttggccatcttgatctatttggtcttggtctggctgatcattactggattcaaaactggaatcttggtcttcagcttgatcttggtccgatagtttagcctttaattcaacagcctcttgggtcttgtctaagtcaatttgcttaaaggttttgaggctcatgaccttgtcccaacggttgtccatcagggttgaatgataggtcttaaccatgtcgtggaggccttttttaaagcggacactctcttgtctcaaggcttccatttcttcttggacgaagtggacattatcaatcgcctcagagaggatttgccgggcttcaagcttagatgtctggcggacccgatcagcttcctccctggcctcggtaaccaagtggttggcctctgcatgggcatcttctttcagccggtctgcagcatcctgggcaactaagatggaccggttaagggaatcatgtttctcaacatattcatccaatctttcggttaaacggtccaacttttcttctaagtcttggtttttttggtctaggtctctataggcctggctcacttcatttaaaaagctggctacttccgcttggtcataaccccttaaacgggtggaaaaggctttgtttttaatctcatctgacgtaatcgacatccgtcttcctcctagcgtgaaactagtctataaaattcaaattaaaataacaagtgatccactatttatgcaataattttttgacttcgatcaataccttgtccttctttgtctgcttgaccgcccttagaaattgcaagcgaccaaagccccgaacagaaaccatatcctcttcttctaaaaccaggccagcttggtcaacctggccaaagttaagcttgacccggtcttggtcaaccagacttttagccttggaccgggccaagttcaaacaagatgcaataaaggaatccagccttaaagaagaaacaataacctggtctacggtccaatcttcctggttatcgataatgtcggactggtttagggagtataaacgtacaggactggatcccacccggtcgacctggatggtgataaaatcactcaggccctggtcaataaaaaattgccagcgtcccgaatccgatatgatgtcccctaatttatcccgcttgatacccgtccctaaaatagaccccataatttgcccgtggctgagcttattaaatttgtgggggtagtcgatttcaaaaccagcaatgtcatagctcaattcatgagtgggtaaataatctggataaatcaagccacgttgacgctctgcccctgggtgtccgccccaataggaaacctgcaagtcagggtactgggcaacaatagtagctaagatataagcttgtctggggtccagaaatgaggttaggtaaggagcataagtatcacttacacgccttacccaatccattgctaggtcaatataatctttttcattcggtctaaagtgttggtataagtcttccatggtcatatcctttagctaaaagacatatctaagcaggaggttgacaatcgctactactccctgttcgacaaaaaagagggaaaaataagccactaagcccgcaatactgatgcgaccaattgggggaataaactgtctaaatatccccacatagggctcacataattttaccaaaacttgtccaagtgtcgattggtaggcaccgggcaaccaagatagtaaaaagtaaatcaaaagcaaccaacggtaaaggttaatcaattgaaggctaatttcaccaaggatcactattaaattggacatttacattctcctcaacctgtttattcctcacggtccaagcctgaaatgtcatttgcatcaatttcaatattggctggagttgcaaggaatatctggtcgcctaccctttggatgtcgccaccgatcgcgtaggtgactcccatcataaagtcaatgactttcttagcctggtccttatccatccggcgaaaatttaagataacggactggttggtcaacactaaatctgctatttcctttacttcagaatagagtctgggctctacaaccttaatccgaagcttttgactttgatttttattcatggataccaaactgagtcctccactcttgtcttcctcttgcggggtggagcttgctcctcctggttgacgactttgtcctgtcgctagcctgggctccttttgcttgactgcttggtcttgactaccttcttcatcatcaagcatgaaaaaattcgaaaatgtctctttcaaactcatcctattatcctttcaaaagggcactaattcttgcggcgacgtctaaagaaaggaggggtatccaattcgtcatcatcaccagagtctgctggctggtccttactatcgtcattgaacaggttttcggaccgatcgacttcccgtctttgagagcttggtcggtcttggtcttcccctggtctttcattggattggttttgccagctagagaagctagactcactagctgatcgagcttgacttttttgactaggaccttggctacggtttgaggatttagaagatttctcgcccatgtctttaccagtgataccagttgcaataacggtaacgatgacctcatcttccaggtcttcattgatggaagtaccgaagataatattaacatcaccagaagcagcagccccgacgatatcagaagcatcttgagcttcaaagagggttaagtcttggtttccggttatgtttaataggacattttcagccccattgagggagacttccaaaagtggagatgaaatagctttcttagtagcttcagccgttctattctcacctgaagcagacccaatccccatcaaggcagaaccttggttggccatcaccgttttgacatcggcaaagtctaagttgacgtagcctggattggtaatcaagtcagatataccttgaaccccttggcggaggacattatctgcttctctgaaggcttccatcatcggtgttttcttgtccacaatttctagcaagcggttgttggagatggtgacaagggtgtcaacatgttcccgcatttgggcaatcccttcggctgcaaagcgcccacgttttggtccttcaaaagtgaacggccgggtaataacccctacagtcaaagccccttgttctttggcaatgcgggcaataatgcccgccccgccagtaccagtaccgccacccataccagcagtaacgaagaccatgtcagctccttcaagagcttcggcaatggtttcttcactctcttcagccgacttacggccaacttctggattagctccggcaccgagtcccctggttaacttctctccgagttgaattttagtctcagctcggttggcatcaagggcttggacatctgtattggctacaataaattcaacgccttcgactccatcttcaatcatccggttaacggcattgccaccagcaccgccaacaccaataaccttaatctttgcgccacctgaaactgtattatctaagttgaaatccattatgagtattcctcctgaaatccttatttaatcgaaaaatgtagtaaagaaatgcttgattctgtctgtaaaattgccttcttctggactatccgactgactagcttggtctcctgctggctcatcttgcgtcttttggtcctgactttggactgaatcatcctggtcaactatccggttagcaggctggctatctggattaataccgatattttgcaagatggactggttgatggcccgctcaatatcagaagtctgggcttggtagagggtcaagccgactgccacagtgaaggcgggagttcggatacccatgtagtcgggaatgtagagctctgaccgaaccttgaagatgtcttcagccaagctgtcaatacctggtatggcagctgaaccgccggaaataacggcaccacctggcaattggaaggcgttaattgggtcaaggtcagccttcactttttcaaagatttggctaacccgggcttcaataatttcaccgacataggattctttaatcttcacaggttcattttgacctacaacatctacttgaacagttgaatcagactgacttttaatggccccaacttctcttttgagcttttctgcattttgctgtgaggtgttgatgacaatggaaatgtctttggtaatatattctccggcttcttggaccacattggcatacttcacttgctcatcgtgaatggctgatagggtcgtttgacctccgcctatatccaccataactgtaccaaaattccgctcatcctcagacaaggctaccttggccatggcttggggctggagaattaaggcagcaatttgatagcccgctttttcaacacaacgtctaatgttatgtaaaattgttttaggcactgaaattgctgtcccgtaaagttctaaccgctggcccaccatgcctctcggatcatgaatttcatcaaaaccatctacaataaattcttctaaactgacggataataagtctctatctggcggaacgatattagcaatggactggttgactacccggttcacttcctggctgtctatttccttggaccggtcatctacagtaatgaccccgtgacagggttcaatactaacaccattagcaggaactccaacaatgagctggttgatcataacaccagtcttatcagcagcctgcttcactgcagtatgaatggcctggacggtagcatctatatcgacaaccatgcccctttttaaaccttttgattgagcttttcctactccaataactttgagctgattattatcaacttcactgacaactacttttattgaagtggttccaatatcaaggcttgtataaaccccatttttcatattcattgaaacctccatatctaaaaacattctattatctgtttaattttaccataaacactagcatttgtttaataatcttcctggatctttacaggattgtcacaaaagcaaaagaggcttaatgattgatcaatagcgaactctagcttcctcaaaaagcttttagctagtaactcctactctgtttgagagtcagcttgggaggggtcaactggattggccggggcagtttcaggggcttcaagaccagctgaattcacttcttggtcttgggagtcctcttggtttaaacgaccttcttcttggccttgagacccatcttgattttcttgaccttcttctttgtcctggtcagtttcttccacttccgcttcttggtcaaagggtctaaagaagctaccagcttcgaggtcaaagagacctggcacttggtctacggctgcagtgagttgtggataatagtttattcggcgggcaaagtagggaacattgattaagacctggttgccgtctaccatatttaattttaataacttaggattacggtccaagtcaagccattcaatttcggaaatctggcttaagaccgaatcgttggtctcctttaactctcctaaaagctggtcaaacaagtcactcctaggatcaaagttcaaaagcaaggggacagaatctcttgagtcttggactagtgttaaatccttgttttctaagatgtcataaagaccctctgacccctcttcttcagcattcaggtggatttggcctaagagatcatactcttcaaccctaacaccaagggtctggtagtcatccatgcttattgtaacggcttggatatagtcttctcggtctagcaggaccttgccgtagtaacttcggtctagccaggtttctaccatgggactggctagctgcaagccactggattggataacttcttcatcagacactttgtcattgccttcaacttgaatggtttcaatcttgttcaagggcgaaaggaggtagaagcttgttagaaaaatgaaggaaaagaccaggatcaaagaagccgcctttatacggctcgtttttttgctttgaggaccgaacttacccttagttttcaccattcatcctccctttcctttaatcgatgtctgagttaatatcttccttaaccatggacaagatgagagcgatcaacttgtctgaagcttggggttggcccatttctttcgcttgttgggccatcttgtttctttttgcgtcatcatgcatcaggtcatctaagcagtttaagaggctttggccatttagatcattttccttaatcattaagccagcttgttggttaaccaaactcatagcatttttggtttggtggtcagccgttacattgggacttggaattaaaatgctggccaagcctaatgacataatttcggctagggtagtggccccactacggcaaaccaccaagtcaatagccttaaaaacttggggcatgttatcgatataggattcaataaaaatgtttgacggcttatgctggccatagcggttatcaatttcctgttttatccggctaaaattagctgatcccggcacaaacaagacctggtagtccctctcagccagttgactatatgcctcaacaaaggccttattaatagcataagccccccttgacccaccaaaaataattactgaaggttgggacatgtccatgccatacttgtggaggctaaggccacccttgacttggctgacttcctgtcctcttggattaccagtcaaaaccagcttatccttatacttggcaaaggatttttcagcttcctggaaacttagggcaatcttgtctacgtaccgagccaaaaacttattggtcaccccggcgacactattttgttcgtgaatgagacttggaatgcctaacttggtcgcctggtatatgacaggggcacaaacataaccacctgtccctattaccacatctggctgaaagtctttgatgatttgcttagacttactcagggcctttagaaaataaatcagacttttagtattatatttaatgcttttgaagttaaacttccggctaaatccttctactttgatcgggataaagtcaagtcctgcttgggggaccaatttattttccaatcccctttgagtgccaacatacaaaaactcgacatctgagtgtaagctagctaggtgcttagcaagggccaaggctgggtagatatggccacctgttccaccgcctgataataaaacttttaatgcttgttttttagtttccatacttgctcctttgctctagtctttcaaccagctgctggattgcatcaacataatcttgtcctctctcttcaaagttagcatattggtcccaacttgcacaagcaggagaaaataaaatgacttgtcctggctcactcaagtcgtaagccaaatcaactgcttcaggaactgtctgggcaagctcaacaccctcaatgtgacggtctttaaaataccgggctaacttatctttggtctggccaaaacaaacgacccccttaaccctgtttagagcatggtcaagcttggaaaaatcatcttggcggtctaggccacccactaacaagatggtatcttggtcataggcttctaatgccttctgtgtggccaagctattggttgccttagagtcgttgacaaaaagccggtcctcataccgcccaaccacctggctgcggtgggcaacccctttgaagtggttgacagcttgggcaatggtttggttagagagcccctttattttagctacgcaaacagctgctaaaatattttgtaagttgtggctaccagaaacttgaactcggtctaaagccatgactggctcttgattatagataagatagtcatccttgatataggctccttggttcagttgacccttgtcagtataggggaccagctgggctttagagtattttttgaccaggctagccaattcttcctgaccctggtagtagactaggtagtcatccggaccttgagcctgggtaatccttagcttagccctaacatattcctcccgactcttatggtagtcaaggtgggcggaataaatattggtaatgactgctatatgaggggtgaaataggtcagtgactgtagttggaaactagagagttcgacaaccaggttagattcagctttaatttctaaggccaagtcactaaccggttggccaatattgcctagcttgtagactggtttaggttcagggctttccgcttgatcttgggctaaaatatcataaattaaagatacggtagttgtcttgccattggtcccggtaacagcgatgggcttggcttttaagatgcttcctgccacgtccacttcagttaaaatgggaatagccagtttttcagcctggcctaccactggattggtgtaaggaatgcccggattcttgacgacaaagtcaaagcttgcatcaagtaaatcctctgggtggtagccggtgataacttggaagccctcttcaattaagacctgggcttccgtattattttctagggccaacttgtcattgacgatgaccttggcccctagtttttttaacaaatgggccgcactgagcccgctttttgccaagcctaaaactaaaaccttcttattgcaaaataccgaatcaaccatcttgccaaacctttctaagtaacgttagagatgcaaaaaaactggagccctcaccccagtttgcttaattaattataccaccatccaaatcgtgactaaagaagtaatgatggtaacaactgaaaaaacaatgactattttccattcactatagccattcatttcaaagtggtggtggatgggggtcatcttaaagatccgcttgccccttgttttatatgaagccacttgtaagatcacactggctgtttctacaacaaagactaggccaatgaataacaaggtccattcttggtttaagataatggataagctagcaaagacgccaccgatggccaaagatcccacatctcccataaaaatcttggctggtttaatgttaaaggccaaaaagcctagcaagccacccactaaacttaagatgaacaagaggacatcatattgttcctgccagacagctataaaactataagctagcaaggctaggatactagtagtccctaacaggccatcgataccatctgttaaattagtcgcattggaaaaaccaaccaaccaaaaaacgacaaataaggggtagaggaagcccaagttaatggagagggagaagggcaggttgacgatagtcgaaacatcggcgataaaataaaataccaaggcagctaggatttgacccagtaatttttgcaaggaggtgagccccaagttccgtttcatcactagcttgatataatcatctagaaagccaatcaagccgtaaaccaaaaagaccattaagagcaaagcgatatctttggttcccgtcccgattaaaaaggccaaagcgatggtcaccgtaaccgataagataaaggctaggccacccatggttggggttccactcttactttggtgccaacttgggccaatttcccgggtggtttggcctaattgtttacgcctaaagtatttaatcactaagggcataaggataagggacaggaccaggccgcttaagaagggccagatgagttgtaaattaatcataaatatctcctattgcgataataatgggtctatggctaacggccatggacccatatattttgatgtctttattgtgtttaaaagcacatccaagattattttagcgataatccccctagcaagcaatcactttaataaagattttaaaattgctattcagcaaaagttgactcatcccaagcctggtctggatggtcaggaatgttggactcgtgacttgtttgactggattcacctgatggatcagacatggtcactttaactgggtcgccagattcaatggtggtttgggccggactatcttgactggtcacataaccttctccttcaatttccaagtctatcccagtcaaatcacttaagcgtaccaaatcactcttagaccagcctcttaagtctggtagggtcatggccccattagtcactaaaatgaccttctggccactggcaacttgaccagcttggccaggtgattgctggacaattttatcaccttgaccaactaaactgtaatccaaatcagcttcttcaactaggtcaagggcttcttccttatctttttcgatcaagttcggtacttcttgtaagtcatcttggaaatcttccacaccatggtcaaccccttcttcgagtagaagccgttgactcaaggggtcaaaaatttgcttgaccacctggccaccataattaacttcttcagtcaattgaggctgttggaccgtaatataaaggatatattccggatcatcagctggcaacatggtgacaactgagtaaatatactccccgttagaagaataatattgaccagtttctgggttaacgatctgagcagtccctgtcttagcagcaactggaactccctcaatttgatagccattggtggtacctatatcactttctacccccattcgtaggtagtccaaggttttttgggcagtttctcgagaaatgggctggcccaccacctggccgtcctggttttcagtttcaactttggattggtcttcttcaccttcctggtcaatgtcttttataatattcggccgaaccatttctccttgattgctaatggcggtaaaggcttggagcatctggataggagtgacggtaattccctgaccaaaagccgtgttgactttttgcaagtcccaaaggaaggggttttggccaggtctttcatttggtaattcaataccagtcacttgaccaaagccgaaggcatccaagtaagacttccaggtttcaagtcccatagcctcgaccaatttgacaaaggccacattactagaccggaaaagtccttccaggtaggtaatggttccccagcctcctggtttgacatccctaacccggcctcctgccacttcataagtacctgactcgaaataggcatttgggtcaaagaccccctcttcaatggctgctgccagagtaataaccttgagggttgagcctggttctatttcataatcgactaggaggttctgccaggattggtcaatcccctccagggttgtggcattaaagctaggccgctgactggaagctaagatagcaccattttttgcatccattactgttgcagtcattgttttgggcttatggtcagcctggacttggtctagaatattttctagataagtttgcaagcgacggtccaaggttaaatggaggtcgtccccgtcaacagactcttgggcctggactttctggttgggcaaaatataaccataccggtcctgttggtaattaatgaccccgttttcccccgttaattggtcattaaactcctcttccaggcccatgaccccttgaatttggtcattttcatcacggtcttggtcatctacctggtccgactcgctagtatcctgggctagtccaataatatttgaagcaaaagtcccattcgggtacagacgagactggttttcttcaaaagtaatgcctgttaagccttggtcttccaaatcgctctgtatttggccaaccgtatcataggataacttgttgccaactgttccaaattccacctggctagcatcagactctaatttttccagagcttggtcatagctaatggccaggtggttagacaagaccctagcaacttggtcagggtcttggacatggatgggccgagaatctggggcccattggtcagttaaaatggccgtcattttataagtcttggcgtccacggctatggggttattgttctggtcatagatggtccctctctcggctaagaggaggtcatctcccttgtacaactggctaacccggtcttctaggtcttgccccccagcccgacctagcaacatgattccggccagtctgaccaccacaaaagccataaggaagaagctaaccgcgatcatgacataaccaaaccgtctcttatttctatgtccacgacttttgggctggctattcggtttcattattcaaccttccttactcggtcattttggttttctaaaccctggtcacgagcttggccataaacgcggtcgtagcgtgacaattcttggatattttgttctaaatttgtattcatttcagaagtttcttcgatttcttgttgcaagtcttgaacttcttgactgacagcagtcaagcttgaggtcatggaaatgctgaagaggctcaagcccataaaggccactgcgaaaagggtcatgactagcttttccaatttggttaagccaggtctaactaggctatgtttcatgtctgaagcttcatgaccctgtttaacatcaatcttaggccggtcagggagttttgaatagctctcttgatattgtctggctaagttatcgtttgtaggcatcagactcactcctcaattcgttgtttctctgcaaccctcagcttggccgaccgcgaccgattgttggtctctatttctccttggctaggactgataggcttcttgttgactaacttcaaaattggttctgcaaaatcaggtaggataggaaggcccctaggtatatcgggcgggcttgaatattgccgtaatttttgcttgacgatccggtcttctaaagaatggaaagaaatcacactgagccgtccctttaagtttagtaggtcaatggcctggtctagtgaatcttccaaggcccctaattcatcgttgacggcaatccggatggcttggaaggtccgcttggcagggtggcctccctttctgcgagcaggtgctggtatggcatccttgataatttccaccagttcttttgtcctttcaatgggttggtctttgcgtctagcttcaattttacgagcaatttgcttagaaaatttttcttccccgtatttaaacaagatagcaaccaagtccttataaggccattcattgacaatggtataagctgacaggggctgactcttgtccatccgcatgtctaagtgggcatcctggtggtagctaaagcctcttgctgcttggtccaattgaggggaggagactcctaggtcatacaagatcccgtccacccctttgacagcaatgtttgacaattcctgtttgacattgcgaaagttagcatgtaccaagcttaacttgcctgatgcaattgcctcttggaaactgtcttgagcatgactaatggcttcttggtcctggtcgaaagcaaaaagcctaccttggtcacctaactggtccaagattaaactggtgtgaccacctccaccaagggtcatatccacataaagaccgtcttctttaatctttaaggattcaaccgattcttctaaaagtactgtttcatggtcaaaggtcgccacttgcttccctccttaaaagccaaaatcaatcatatcttcagcaagttcttcaaaagatgctccggctgaggcactaacttctttccagcggtcttcactccaaatctcgatccgttcagagacgccaattaagtagcaggatttttcaagcttagcataatcaatcaaggtcttgggtaggttgatccgcccctgtttatccaagctacattctacggctcctgaataaaaaaaccgggtaaattgccgggattccttcttagctaaagggagttgttttagtttttcttctaattctgaccaagcttctttaggatagccaaataaacagccatccaaaccgcgggtgacaatgaagctttcgcccaagctttcacgaaatttagacggcacaatcagccggccttttgcatcaatattatgctggaattctcccattagcactttgtcaccattccctccccttaatcattcacattttaccacaagtccccactttcctccacattaatgtcaaatattaaataaatcatcaaagcttgatcatatgctctagtctaaggtaggtcaggtctttttaaggaaagcttgtccaaaggaattggacacaaaaagagctgtgtctaagataaagtctttgacacagctcttttaacttcagtattcaaatacacttgcaggatgcaagtatccttttatcctgccaaaacttggtacaaggcggctaaaccactgataaggtaaaggacaaatgtgaccaaaaaagttagccgccaccaaattcggaagaaacgaccatagtaaatagaaatatccttagacaagtaatagaccaccatgcctaaaccagcaatggctaaaaggagggccaaaaaaactagccaagtccgaccaaaggcgatctggctaaaccagtgaatggcaaaaatttgataaatagtcaaaatatccggtgttttaatgggaaggttaacttgtttaaactgccggttgatatattggttaaagtaaataaccacaaagggaataataaagagtaacaataaggctataaaataggctacagtattcataaactcttcctctcacaatacaaacttagcctaagtttaccataaaagcaatcagaccaatatcccaaattcgactttcatatcgcctagccaccaagctaaggttaagccaaccccaataaaaggcaagatttgactatcttttaattttgctatggattagcactgcttgtaatgctagagtcttggtcatgacttggcgagattttaaattatagtataatgcttgttattttagaaaacactggaaaaatttcacataatatctgttgttcgagaataacaccagactgaatccccttcaaccggtaaactaatcctttgcaatccaaaacatgaaaaatctaaaaataatgaaacacaaaaaagcgttaggggtaagttctatgcttacccctaacgcttaattacttttattcgcccatcactttttcgccaccgtagtaaccacattctgggcaaatgtggtggttgcgtttcatttcaccgcagtttggacattcagtcatgtttggtgcgatcagttttttgtgagttcgacgtttgttctttttagaactagatgtttttcgctttggtactgccatagggacacacctccttaaatgttatcagtaagggcttcattcgtcttcatcaggaaacaggtcttttaaagctgcaaagggggaatcttcttgggcctggtctttccgttgttgttccaagccttcttcagtcatgacctcccagtcatcaccttttgggaatatccctttctcctcttcttcctcagttaataccttggtcggaatagctaagataatgctatcctcgatcggtttttgcaagtcaagctcttggctgtccagctggataaccaattcatcttggtccaattcttcttggctagcctctcgcccaggagccaggtaggtctcctgcaatcttgccctgcaatcaatatcaaccggggtcaaagaccgagttgatgggacggttaaagctacccttaaattgcaatcaacaataaaggcatcctcgccttctgttataatccaaccatctatggtaacgggtcctgctgcaagaatggacttgctccgcttggtcaaacttgactctaggtcaatttgaccctggatccgggttggttcattgtcttgcttccgcaattcgttcaatgcccatttaattttcattttatcacctctatgtctttgactgataaggttttaatagacataggcaacagcattaagtatactttctatcaccatatttgtcaatactcatatagggttttcgtgtgaagtcttgcttgggcaagtcccccagcctagctagccgatataattcacccgccttgatgtccaaggctaatttatcagccaaatcttggctcagcttagttacaaggggcaaggtcaaagacgacttaatcttgccaagataggcctgacctagagagttaaaagcaagggggcggatataacttggaccaatttggtttaattcttccacttggtcttggtataagtctaggaggcaatagagagctaggcgcttgatccggttgtgactcaactggcgactagtggttaaactgaaaaagtctttcaggcttttagcttgtaagactgcttttttcaagcgttggcttagtcctggcttcatgtcatagattttatccatctccgcttccgtcatattccagactttatattggataaaaggccagaaatcttggggcttgactgggggcagacgaaagaggtcttgcaagacaggtttgggaagatagttctggacagcttgaccttggtaaatttttttgcggattgctgttgccgaagcgattttggcacctggttgggcctggtcatcatggtagttggccccgatacgtttaatggggaaaaaacgaaaatcaagtcctgcttggtaggccgcctttatatatgtaaaagccaaaatattattgggttggcttaagtcgggtagccgagttaactcactggaagccagccagtccataataagttcatggtaggacttttcccttggggactggtttaagaaggatgcaaagtcctcagcatggtccaccaagtgcctagcccccccttgaaagtcttccagctggccagactctaccccaaaagcgagctggtcgacaccaagctggtctaaaagccttacaccagcctgggcaaagtagtcagctgattggatggaaaagggaaggggtagttctaggacaaggtcagccccggactggacagcccattttgccctatgccacttgtcgtaaatggccggctcccccctttgcaagaagttgccagactgacaaaccacaacaaggtcggcctgtctaacttccctagcccggtttagttggtaaaggtggccattgtggaaaggattgtattcagctataatacccaaggctttcacctaggtcaccttcctttcatgtcatactattttcttagcttggaaaaaccaccgcttgccttccgggttaaaattctcttcaaagtcactggtcatctggaccgagcgaaaaccggcttgatgcaataattgctcataaaagcttgcttcataggttctctcaaaatgcctttcatcaaagcggtggtagctaccatcagcttggactaaaaaaattgagaggtcatgttccactgaatagggctggtcgcctggataagaatcccataccagcaaaccttggtcgctttccccatggtaggaaaaaccattaaaatcgtccatctgcttaatggagtgaacatcaaagagaaattgaccaccaagggccaagtgcttgtaaactgattgaaaacaagacaaaagaacttggggattttccaaataacatagcgtatcattaaaagcaataatatgatcatagacgggtaaatccgctagtttggtcatatcagcttggataagggggtaaggcttggtttgctgttctctagccaaggtcaacatgtctactgaccggtccaagccggtcactttataattttgaagcaatttattggctaaacggccggtcccacagcccaactccaagatagactggcctttggggaggcggttttggacccaatccgcccactgatcatacagggtttggttcattaaatcatcgtaaagctgggcaaaagcttggtagtcaaccattagttaacccactctgcaatatcaacacttggggcttccgtccataagctttccaattggtaaaaatctctttcctcttcactaaagacatggaccacaacttcgcctaagtcaattaagacccaactggttgaccccttaccttcaatccggttgacctcaaatccagcctgactggctgcatccaagacagcctgggctagagcattgatctgccgagaactggacccatgtgtgacaacattgtaatcagttataatcgataaaccggccatatctaaagccacaatgttcttggctcgcttgtcatctaaagccttaactaccactgctagtaaattttccttatcttgattcaacctatccactccttatgcaattaagctgttataagtatccaatgcacctgggtaaactaacttgttatctttgattaacttgagcagggtttccttgacaatataggttaccgcttggtctaggtcatcttgagccaagtctctcgccttatcagcctgggagaagtcacggtgaggttctgtataatcagctacaaagatgactttttcaaccagggacatgtttttacgaccaatggtatggtagtaaatggcatttaaaatttccttgtcggtcacgccaaattcatcataagcacaaactgaaccaacagggccatgtaaaatgctattgccgtaatcgagcaactccaagtccaggttttcatttatgacaatattcctcagttcatccatattgacttccttggcataatcgtgaagcaaggccgcaatgctaactttttccgagtcggcctggaagcggtcggctaattccaaagccgttgcctcaactcgcagaatatggttgaaccggtcctgactcagtttatcttctatgcgcttgattaagtctcctctactaatttcaatgtagttttttgtgtaattcatttccttattcttcacccttatataagccattgtcttcaatataatctcttaccctatctggggtcaaatatttaatggattgcccttctgccaccctttgcctgatgtcacttgaactaatatctagttctggcgtatccacccaaataatgggaaagtccacatcagcttggtagcctggtcgcttcacaccaacaaattgaactaaatccagtaattgttcaatattcttccactgggccaaatccataactgaatcctcaccaataatgaagtaataatctgtattcgggctagcctctttcaattctttaatggtatcgatggtgtaagttgtccctccccggttcacttcagtcaagttaagagaaaagtgggggttatcttcgatggcataatccaccatatcaacccggtaagaggcatctatggtttccttaccagcggcatggcccggctttgcagtgggcataaagtgaatattatccaagtccaaggcctcataaacttgttcagctaccagtaaatgacccagatggggcggattaaaggtcccccccatgaggccaattttccgacgggtttcttgtctttcttctgcctctgtttgggtctggttgaccgctgtcgcttgagttttttgcttcatactagtctactccacgaaccttgtctgaaatcaagcggttgttctcataggaagaggacttgtacaagactaaaaccctcccgatagaatcaatgactttgatatcagaattgtcttcaataaaggttgcaatttctttgttggtcattgcagaattttgcaggacagagactttaatcagttctcttttttcaatggcgtcatgcagttcagccaaaatttgatcggttatcccctgcttgccaatttgaaaaatgggatcaaccgtgtgagattttttctttaaaaacttaacttgttttttacttaatgacaattattgtcctccttttcttgtcaaactattttagatcatgggtttacggataaaaatatcggctccttggataatatggacttctacttcaacacctgaagcattgatcttaacccagcccagaccagagtagaccaaatcagatgcttggtcgaccttgaaagttcgcttggttagagtttttttatccttgctgtcaaatggtggggtcaagtcttttcctaactggctttggtataagtcgtcagctctttccctttttgtccggtggatggacagagaaggagctgcataaaccacaaaagaagccttgcctggaccctggacatagtcaaaccggcctaagccaccaataaagagggactggcctgggttcagttggtaggtccggggtttcaactccttgcggggaatgaccgccttaacttcttgaggattgagttggtggaccacctggcctggctggaagattcctggtgtatccaccagtttatgaccatcatcaagaggaatttcaatttttcctaaagtggttcctgggaagtaggaggtcgtgacagcatcttcttcttggctggccaagttgataatctggttgattaaggtggacttgccaacattggtggtccctactatatagacatcccggtccccacggtacgcattaatcaagtcgagcaagtgagctactgatccttgccggactgcagaaatcagatcaactgctaggggcttaacccccatgtcatagctaacttcttctaaccattgtcttagctttccccgtttaagtgacttaggtaagaggtcaaatttattcccaacaatgatcaaggggttgttaccggtcaagcgaccaatgccaggcacaaagcttccgttaacatctaaaatgtcaaccacattaacgactagggcctcttcttgggaaatctccccaagcatgttcaaaaaatcgtcagaggtcacttgaacatccgctagttcattataatgcctcagtctaaaacaccgcttacaatagaggtcatcctcagaccgcccttctagggctgattgagggaggtaaccaggttggtttggatcttggctttggagtggggccccacagccaatgcagtaaattacttcatctgggttttcttgcttcactgtatcttggcctttcttcatcatactaaacttcgcatcttatttcttcaaatggtcatctaaagaatctttccattccatatcagggttatacttgactactagcttgaggatattgtattcaattaaccggttgaacttggtattccaagcgtctgaagccaggatgggtttgactaagacactgtctatcttaaatcgattagctccaacaatatcagtaatgacctggtcaccaaccataataatattttcttttggctggttgaccaaggaaaaggccttctcaaaaccctttttacaaggtttaaaggctgatggaatgtgggttacgccagtgtgggccactgctttttccacccggtctttattattatttgataagactataacctggatgccaaaatcattgagctggtccagccagttaattaactcctgagttgccttggggtggttccaagcaatcaaggtattatccaagtcagcgaagaccaccttcttaccccgtttaataaactcagagggttcaatattataaactgattctaccatataagtaggcttaaatagacttaacatagctggtcctttttcactcgttctttttaaaatgcctaggctgcaaacgttcaaaaatttcaacagctaggtggtcaatatcgtcaaattcatatacattatttttttcagacagggggtcgatcagtttaaaattccctgtaaagccatcaaacaaaaccacacaccgctcttgaccgtcaacatcaaagtgtctaacttgtctgacgcttgttttatcttcacgcatggcattcaaccgtttaactattgacaccaagtctgaagaataaaccatgcaaataaaactcccttctacagtatacacactaagttaattttatcaaaaacaagttcagtcttcacctgctttggctggccttatctttggggcaacgaaatcagtttaaagaagttaaaaacacacccactccctcagcctggctgactaggctaagttagggtgtgtttatttaagccctgttgaacttccttattttgtatattcttcgactagtttaacaacttcatcttgggttgtgcactcagtcaaagccttgttagctaattctgccatttcttttgagtctagccgggagatcaaggaccgagtcttcaagatactggtagcagacatggaaaattcatccaagcccattcctaagaggaggggaactgccaactggtctccagccatttccccacacatgccagcccatttgccttctttgtgagccgcttggattacattatgaatcaagcgtaggatagaagggttatacggttggtagaggtaggaaacccgctcattcaaacggtcagctgccatggtatattggatcaagtcattggtcccaactgagaagaagtcgacttccttagcaaactggtcggccaacatagcagctgctgggatttcaatcataatcccaatttgcaaggaatcagagatcgtttgaccttggtcttctagcttgtctttttcttcttggacgatagccttagctgcccgcaattcatccaagttggacaccattgggaacatgatccgcaactggccgtaagttgaagcccggagcaaggctcgaatttgggttctaaagatttcatcccggtctaaactaattcgtaaggcccggtagcccaagaaggggttcatttcgtctggcagatcaaggtaaggtaattccttatcgccaccaatatccatggtccggaccacaactggtttgccgtcgaccccttctaagacttccttgtaggcttggaactggtcttcctcacttggtaattcaggggaatccatgtagagaaattcagtacgataaaggcctatgccctctgccccattatcgctgaccccttcaaggtctttgggggtcccaatattagctgccagttcaacttggactccatctttactgatgctgggttcatctttgagcttgttccattcagccttcatgctttcgtattcactagctttttcctcatttgcttcaatctcttggtcagatgggtcgatgatgacttcaccggtcaccccatcgactactagttcttggtcttttttgaccgtgctagtgatttgacctgtccccaccacagcagggatttccagtgaccgagccatgatggctgagtgagatgtccgcccccctacatcagtgacaaaagccttgacgtattttttgtttaactgagccgtgtcactcggggttaaatcttcagcaatcaccactacttcttcatcaatagctgacgggtcgggtaagtcaacacttagcaagtgggcaatcacacgttttttgatatccttaatatcagaagcccgctcttgcatgtaggggttgtcttccatgccttcaaaaatagtgataaaattgtctgccactgcttcaaaggcataagccgcattgacctggtcttctttaattttagtggtggtctggtcacttaagtccggatcagccagaaccatgatgtgggcatcaaagacttgggcctcttcttcgcccacactttcagccgccttttgccgaattgtctgcaattcttccgtcgcttggtcgattgctgctttaaatctttcaacttcagcttctgtatcttctactgattgttttgaaacagttaaatcaggttgaactaatgggtaagccttggcgtgggcaaaaccatcactagcagcaattcctgttaatttgtttcccattttattcagccattccctcatttttgatagtttcttcgattgcttcaattgcttctttttcatctgacccgtcggcactaatggtgacatctgagccttgaccagcacctagggacataacccccatgatggatttaagattgactgacttgccttggtattccaagttaatgtcagaagaaaatttacttgcagtttgaaccagtaaggtagcaggtcgagcgtggataccagtttcagcagtaatgtggtagtctcgtttttccatatttcatttctcctttatatcgatccaattttataaaagacaattaagcaaggcactaatcgactttcaacaataagattaccatttttttggggcttggacaactattattatatagatcacaagcatattgcttgtcataccagtctttttgaggggttgaaataatttaataaacttgataaaaaaggttgaaagtcaaacaaggtcagagtataatagactcatgaaaggtcaaagatagtcaaacacctttcaaacactccactatcacgaaatttagtataaagaaaggaaggccgtttatgctatgccaaagatgtaaccaaagacaagctagcattcatttgacaactgctattaatggtcaaaaaagagaaatagacttatgtaaagaatgctaccgcgaaattaaagaacaagaacaacggggtcggatgaaccagagacgtaatgacccatttggagacttcaacaacctagatgacctctttggatccatgttgggtggctacggcgcaaaccgacaaggcattaatccagagtctgctatgggtggcggagacgctggcccaggccaaggtcaagctggtggcggtggactcttagatgaatatggtattaacctaacccagatggctagagagggcaaaatcgacccgattattggccgagacaaagaaactgaacgggttattgaaatcctaaaccgacgaaccaaaaacaacccagtccttattggggaagcgggtgttggtaaaactgctgtcgttgaaggcttagccaacaagattgcccaatccgatgtccctcaaaaattgcaagaccgagaagtgatccgcttagacgttgcttctttggttcaaggaactggaatccggggacaatttgaagaacggatgcaacaattaatcaatgaattgaaggaaagacaaaacattatcctctttattgatgaagtccacgaaattgtcggtgccggaaccgcagatggcagtaacatggatgctggtaacatcttaaaaccagccttagctagaggcgaactccaaatggttggggcgacaaccttaaatgaataccgtaaaatcgaaaaagactctgccctagagcgacgtttgcaacccgttaaagtagaagagccaagtcccgaacaaaccttgaccatcctcaaaggtatccaaggtaaatacgaagaattccacaaggttaaatacgaccctaaagccttaaaagctgcaacagatttgtccaaccgctatattatggaccggttcttacccgacaaggccatcgacctaattgatgaagccggttctaagaaaaacttgaccatcaaggtctctaaccctgatgagctcaaagaaaaaattgcccaagctgaaaaagctaaacaagaggccttggatgtcgaagactacgagaaagcagcccactaccgagatcaaatttccaaattcgaagggatgctagaccagcaaaaccctgaatcaaccacccctactgttaccgaacaagatattatcaatatcattgagattaaaaccggtattcctgtcggtgagttgaaagaaaaagaacaaacccagcttaagaacctagaacaaaccttggaagaacaagttattggccaagaccaagctgtcgaaaaagtttccaaagctatacgtcgtaaccgaattggtctccgtaagaaaaaccgcccaattggctccttcctcttcctaggcccaactggtgtcggtaaaaccgaactagcgaaaagtctggctaaggaactattcggtagcaaggaagccatgatccgactcgatatgagtgaatacatggaaaaacactccaccagtcgtttgatcggttcccctcctggatatgttggttacgatgaagctggccagcttactgaacaagtcagacggaaaccttacagccttatcctggtagacgaggttgaaaaagcccatcctgacgtcttgaacatgttccttcaaatattggatgacggccacttaaccgactcccaaggacgacgagtcaactttaaagaaaccattattatcatgaccagtaatgctggctcaaccgatgagattggaactaatattggttttggcaaagatgaagatacaaatgatgaactactcaaccgcttgaccaattacttcagaccagagttcttaaaccgtctcgatggcattgtagagtttgattctctctctaaagaaagtctcatttccattgtggacatcatgctcaatgaaatccaagaagcgattgctgaaagagacttaaccattgaagtcagccgtccagctaaagaaaaattagtggacctaggctacaaccctaaaatgggagcccgccctctccgccgtgtcgtcgaagaagaagtggaagaccaaattgcccaattctacttggacaacccaggtgtccacaacttactcgttgacctaaacgacgatggtgtgatcaaagtcagcgaaaacaaggctgaagctagtcaagctaagagctcagaaagcgaccaaaactaagggataagcgacaaattagtctcaaacaatcagaaaagcgacccaaatttgggtcgctttttttgtcttggtcaatgccccactataagagggatttcaactcaacatccggatacttatcgctaaaccagcgcatggcaaattcattttcgaataagaagaggggttggtcgaaccggtctttcaccaacatatttcgtgaggaactcatcttctcatccaattggtcgggatcaatccagcgggcaattcggcttccaatgggctgcatttcaatgtcggaattatattcatgtttcatccggtgctctaatacttcaaattgaagttggcccactgcccctacaatataatcattgcccaggtaggtcttataaagttggatggctccttcttgaaccaattgttccagtcccttgtggaaagacttttgcttcatcacatttttggggtcaaccttcatgaatatttccggtgtaaactgaggcagatccttaaattctaccccttccttgccagagtagatggtatctccaatttgaaaggtcccggtgtcataaagaccaataatatcgcctgcaaccgccttggtcacggtctcccgatcttcagccataaaggaggtggaattggtcaatttcatggccttgtcgccccgggctagggtgacatccatccctcgctcaaattggcctgaacagatccgtaagaaggcgatccggtcccggtgtcgggggtccatattggcttggattttaaaaacaaaaccagaaaagttaggatcactgggttggatgacccggtgttttttatcttcctgggaagaaggctttggggcaaattccaaaaaggcatctagaaagttttggaccccaaagttggttaaggccgacccaaaaaagactggggtcaagtcacctgccatgatcttttcccggtcaaagtcattgcctgcttctttcaaaagaagggcttcttccagggtctgtccgtactgggcgtcagccttgatggggtggtcgcccacaatttcaccctcttcatctagatcaagcaagtccctgccatcctcatactggtcgggatcatgaacttgaacccggttgttgtaaatatcataaagacctaacaagttccgaccagaccccattggccagttcatggcataggcatcaatgcctagaacttcttctaactcttctacaaggtccaagggttccctgccgtctcggtctagtttgttaaagaaggtaaagataggaatccccctcatgcggcagaccttaaagagtttttccgtttgtgattcaattcccttgctggaatccaccaccataacagctgcatcaacggccatcaaggttcggtaggtatcttccgaaaaatcctcgtgaccaggggtgtccaagatattaatccgcttgccctggtagtcaaattgcatgaccgaactagtaacagaaatccctctctgcttttcgatttccatccagtcagaggtggcaaatttccccgtttttttggccttaaccgtccccgcctggcggatagctcctccaaatagaagcatttgttcagtgatggtggtcttcccagcatccgggtgggaaataatagcaaaagttcgccttttatctacttcttgactgatacttgtttgtgacataaggactccttctatcaattcatttaacctaactataataccaatttctccttgagacgacaaggcttgcaagctaaaaaagcctgcgaccctgcctggttttagggtcacagctatatctttataacttaaactccctcgagcttcaatcgttgggacaaaactagcaaatcctctggcaaggaggcttgcaagtgaactctttgaccagtcaaggggtgggtaaagtccacctgctggcagtggagggcctgacggtctattatacctgcttgacctccgtaaagactatccccaagtaaggggtggcccaggtgggaaaaatggaccctgatctggtgggtccggcccgttaagaggtcaatagttagcaaggaagcctggttggactggtcaaggacccggtagcttgtttgggcaggtttacccccttgcttaacttggcgtttgataattgaatcctccatccggccgattgctaggtcaatgaccccttctattggagtgacttgaccttggaccaaggccaagtattttttggtcaagtgtgaccgagtcgtcattaaatggtggatatactggtgcttggcaaagaggatgatgccactagtgtccttatcgagccgggtaactggatggatcttcaggttttcggctccttcttttatgtaataagctaggaccttattggctaaactggagcttcggttttggggtgaaggcagacaaatttgacctgcagacttgtttaaggccagtaagtagtcatcttcgtaaagaatgtccaagcccccttcattaggagctaggtgggggttggcctcctctttgggcaggtcaagttcaacctggtcccctttgaccagttcccaggtcacccggacgggctgatgattaacccggatagctcccttgacttgcttcagtttggttaaaaaacgtctggacagacccttttccttgaggaagtctcttaagatcagttggcctccttggttaatccaagtcacttgcattccgttttttcactcccaaaaaggcattctccacccggtcccaaaagtgggtatggtcataacgggcaaaactgacccgttccttggcaatcttcagttttacttcagccacattctcttcttctgagactagctggtccaccattaaggtgatggaagaggtattcttaggctttagggtaatccactctttgggggaaataacaataggggacgacaaggtccgaaaaacccggttgtttaaactggcgatttccgtaatttgcaaggcttctaaactaggatggagaacggccccgcccactgacttattgtagccagtagacccagtcggcgtcgacacacacaagccgtctcctctaaagcgttcaaagaattcatctcggataaaaaggtcacaaaccaaggttttgtccattaattttaaaatggactcgttcaaggctaggtagtgtttggcttcttgaccattttggtaggaaattcggacatccaaaagaggatactcttcggcttcttgcttgtcatttttgatctgatcaactaagtcagttaggttaaattctcgccaatcagtataaaaacccaagtgccctgtgtgaactccaataaagcggacctggtctaatatatgggcgtagcggtgaaaggcagacaagagggtcccgtctccccccacagaaatcacgatatcaggggccaggccatcgatgacgacaccttcttcctggagcaagtcttccaggctcttggatacttgtttggacttttcactttggttgctgataattgtcacacgcatagacactgctccttaagtgcttgcatcgtctggtttttctgcttcttcttcctggctaatcttcttgcggatggccgacatctcctcatccaactgaaagacccggtctgccgtttcctgcaagcctttcttgatttcagccgggtagtcaccttggtgcttgtagttcaaggagtgttcaatagaagcccagaaattcatggccagcgtccggacttggatctcaactaaaagggggtagacttggtcaataatgtagactggatagcgacagatcaaatgatatgaccggtagccactttccttggtattggagatatagtccttttctctgataacttccatatcctgtcgcttcctcaccatggcaacaacttggtaaacatcctcaataaaggggcacatgatccgcaaacctgctatatcttccatctcttctagctggtcaaggggaagctggacttgctctgccttggacaagatactatccacgggctttaagcgaccagtcacaaattcaatgggacttgctaggtttttatgccgaaacatggctcgctgcccttttaatttgactttaagctcttcaagggccagttcatatgggtataaaaattggtcccagtctttcgtcataatcataacctctttatttctttttcttttcctccatccattgtatcatagataggagtaaaaaatagaaaggctggttaggatgagccaagaattagaaattgaattcaagaaccttttaagcaaagacgaataccaggatttatttgacagctatcactttagtgaagtaaagcccatcattcaggaaaattattactttgacactgaggacctagtcttaaaagaacaatcttgttctgtccgcattagaattgtaaaggagcaagaccaggctgaaatcaccttgaaatccccctctcacaaccatgaccacctggttgaaaccactgaaaatattcctttagcccaagcccaacaaataatgaaagcaggccaagtcatcctgccccaatccattgcggaccagttaagccaagaaggcctaaaagtaagccagttaagcctcataacctggttaaaaactaaacgttttgaaaaaaactaccaagactgcctcttagtcctggaccatagttggtatggccagaccagtgactatgagttggaattagaagcccccagtcatgacaaaggactggatttattctatactatacttcttgaacataatattccccaacgtgataaagtcaacaaagtcgcccgggccttctctcaactttaaacagtttaaggcaaattgttagccggcctaagcattatttgataccatacaagtatagataagtcacacgataatagaaggtggattgctttgaattctaaagatatgatcgagattttcctatttgtaaatccgctagataagaatagcttggaaattgctcggtctgtatttcatttcccggatacccgtcatgaaaaggtcagtgttcgtttcgtcaccattaaagccaatgacgactcctacccaaatgccccacacaagggcaaatctttagacttcaaccctagttttatcccctgccttgccttccaggctgcttccatgcaagggaaaaaacggggcatccaattttttataaaattacaaagcctcctctttgaagaaggctatgaacttaacgaagaaaccattttagaagcagctcaagcaggacagattgacttgcagatgtttaaagaagacctctattcagacttggctaaaaaatcctaccaaagggacaagcacttagccaaggaaatggaggtcaacaaggtgcccacttgtatcatctactatcacacggaccatatgaacaaggcaaggatggagctcatgatcaatgaatacaccctccactacgcctgtaatacttgctctagagcatccaaactgaccaatgccctcctcccccttaatcccatctggcctaaccatatttaaacgatcgcaagcagttgccctcttggaggtaactgttttttcagttaaaaaatatatacaggatttttgaacttaatggcttcctgatactcttacattattcattaagggtctgtatagagagttggatcacttgatcaaagcttgcttctgaagactataatttgtgggtaaccatgataagggtgacttcagttagtgatagcagtaaatttttaattaagatggagctttcattatccagagaagaggttgcctcgtcacagatcaataagactggttcctttatcaaggccctagccaaggtaacttttgcccgcccgatagactatattagcagctacatttactaataatgctggattaatcctaccttgtttagacatccgacaattgacccatggtaaaagaatctccaagctcctattttcttttaccattccttggaaaagataggtttcctgggctaagtaaacaacttcttgggtgggtgtaggtccatacgactaataaaaacttgtcttaaacaaatttatttagtaaagttagactaaatatatgttggaggttcttttgcatgagtggttttttaaatggtaaaaccgaccaggaaattattgaccggatcactgatggcatcgttgcaacatatgaccaagttcttattaagatagacggtacaaacgccgttaagaaatccataatcccaaacaacaaggtagtcctcatttctggaggaggcagtggccacgaacctggccactatggttatataggggaaaatatgttggatgcagctataatgggccccatttttgagccaccaagtcctagccaaatattcaaagttattcaagagacctacaataaccagggtagcttgcttattattaaaaatttcgaaaaagatgttaacaacttccttgaagccgaaaaacgagcggttgctactggtatgaaggtagatcatgtcattgtcaacgacgactgctcgatcgagtcctctagttataaacaaagaaaacggggggtagcaggaagtgtccttgttcataaaatccttggtggagctgctagcaagggcttatccctagctcaactagttaagctgggtaagcaagttgttgaccaaactcggacacttggcgtatcattttcaaatgctagtaccattagcaataaatcagcccaatataagctggccgaagatgaaatgttttttggtattggtatacatggtgagcctggttatcgcaaggaaacaatgcagtcatcagagagaatagcccttgaactcaccaataaactcatccagcaatataagaagaataatatcaaaaagctagccattatggtcaatggcctaggcagtacccccctactagaactttctatttttatgtctgaagtcatggactttctagatattaatcatttaggagtagattttaaactgatggggaattttttgaccgcttatgacactgctggtttatccttaacctttgtaaaccttaaagatgaaaagtggctagcttacttaaatgaaccaacagatgctttcggttggaaccattaatcacattgccttaccagtaacattagggtcaaagatggggaatgcaatatgagtggatccattattacccaaaagaaaatagctgatgccttcaagcaagtcttataccagtctgacttagaaagtattacagtatctcaactgatgaaacaagctaaaatgagacggcaaactttctatgattattttttggataagtatgacttagttaactggattttccaacaagagctaacagagatcattaacgataacatcggttaccgaaattggaaagatatcttaggcctcctagttgaatattttgaaagcaattgtcacttctacctcaaagttttaagctatgatggccaaaatgcttttaaattctttttaaaagaagagattgaccaactccttcaatccctattaatatcggcctataagtcaaaggataaaaatattgtctttaaaagtcatgagaatggtttatattgtagaattttaaccaatggattagtcgaaacagtaactgaatggatattaagtgagtgcccaatagatagtcgtgacttatccagatacttcattgattacttgaatcattttataagttcataagactacaaaacatgtacaagagcccgctgcttccctcccccactgaaagcagaccggacaatacttttattttgtccgttgtaaacgttgccattatctcttattataaaagtaaataaaggagaaagggtgtagacttgtgaaaaagattattaacgacccgagtcaaattattgacgagatggtcaatggtatcgttagggaaaatgccgaccgactggaccgtgtcgcaggaacgagtgttgtggtgcaaaaagaaataggtgaccaagtagccttagtcagtgggggtggaagtggccatgaaccagcccatgccggcttcgtgggccaaggcatgctccaagcagctgtttgtggccaggtctttacttcacctacatcagaccaggtactggaagcaatcaaggctgctgaccaaggaaagggggtcctcttaattatcaagaactattcgggtgacgtcatgaattttgaaatggctatggaattggcagaaatggaagacatccaagttgaaaaaattatagtcgatgacgatatagctgttgaagactcctccgatactcaaggaaaacgtggagttgctggtaccgtgctccttcataaattgctgggtgcggctgcaataaatggggccagcctaacagaactcaaagagcttggtgacaaggctgttgccaatatcaatactttaggcgtagccctaactggtgcaactgtcccagaagttggcaaaccaggttttgttttagacgaaaatgaaatcgagttcggggtgggcatccacggtgaaccaggcttgcaaaagacggaactgaaaccatcagctgagattgcccaagagattgtgggccacttgaaggaagccttctcctggtctgctgaagataaatatggcgttctagtcaatgggctaggtgggacacctttaatggaacaatatattttcctaaatgatatcttaggcttactagaccaaaacgatctccaacttcctttcattaaagtcggtaatctgatgacatcactagaaatgcaaggtgtttccctgaccttaatcaaactagaagataattggttagacttattgcaagaagacacacaagctgcagcctggtgaggagagaaaatgtttagcaaagataatgtagttgaaagtttagaaattttcaccaacaaaattcatgatcaaagaggttatctcagtgaattagataccccaattggtgatggtgaccatggtaataatatgaaccgtggggcaaccgcactaaaacaagaattatccaataaagaagcagataatttggccgatgtatttaaagtggctgccctgacttttatgtcaaaaattggaggtgcctcaggtccactttacggctcagcctttttagagatgagtaaggcagcccaagatgcatctgatcctgaatctattttatccgccggtttatctggtattcaaaaacgaggcaaggctgaagttggggacaagacaatggttgacttatggtcaggagctttagacctcattaaggagggacagctaacttatcaaaaactagatcagattgtcgaaaaaaccaaagaaatgaaagcccacaaggggcgtgcttcttacttgggtgaccgatcgattggccatatcgaccctggagctatgtcaagcaagtacctatttgaggcatttattaaagggggtgtttttgattagcagaggaattgtcatggtatcccatgttgaagcaattgctcaaggtctaaagcaattaattgaacaagtagcaggggatgtccccgtaacgtttgctgggggaagtgaagatgatggagtaggtacgtcgtttgaggctgtcaatcaagccattatagacaatgaggcagatgaaattttagccttctatgacttaggtagtgctaagatgaacttagagttggccattgaaagcagcgacaaatcgattgacctgtttgatgttgcttttatcgaaggagtctacaccgctgcatccctccttcaagcagatgcgcccacaagtgccatcaaagaagaactggaccaactcattgtgaagtaagcgaaaattgaaaatcattaaactgttaatgtcgtttaaaataaagacaaaacagagaaaacaaaagatttataaggccttcaaaataagaaaggagcggctaacatgagaaaagccttcatcagtccaacaaaatatgtccagggtgaagaagaactcaacaatttaggatattatattgcccagtttggtaaaaagtctctaattgtcggtaaagacgaagacattcaacgggtaagtgaccaactcgcttatactgaagacaaatttgagctagaatttgtcaatgcaaactttcaaggtgaagctagccgtggtgaaattgaccgcttgcaacaattatttaaggaaaataattgtgattccgttgtcggtctgggtggcggtaaggccattgatactgctaagtgcgtagctgaaggtaaaaatgtggtgattgtgccaaccattgtagctcaagatgcgccaactagtcactcagccgttctttaccacgaagatggaacttttgatgactatgcttactttgagactagcccatcggtcatcctcattgatagctctgtcatagccaaggcacctacccgtttcctactagcaggaatgggagacgctttagcaacgtattttgaagcacgagctacccgtcggtcatactcaaacgttaatgccggcctgcccaacggtgtccgtgaaggagttgcccaagatgccaagggaactaatgcagcatttgctttagccaagctagcctatgaaatgcttttagaacatggccaagcagctaaacttgcctcagacttgaaccaggtcaccccagctttagaagacattattgaaacgaatgtcttactatctggcttaggcttcgaaagcgggggtttagcagctattcacgctatttacaacggcttttctatcctgcacgaaaaatttgatgccctgcatggtgaaattgtcagttttggtaccatctgccaattagtccttgaaaatgcacctaaagcagaagttgaagaagtccttgccttccaaaaagctatcggtcttccaatgaccttagctgacattggactcgataacatcacttatgaggaactgcaagcagtagcagaaaaagccttgatccctgaagagtcgatccactccatgcctttcgatgttacggtccaagctgttaaatcagctatcataacagctgataaattaggccaggcttacaaagaaagataaaaatcttcaaataaagcttcccatcaaccagtccatgtctaaggcatgggctggttgatctttagtattaaagcctatctcaagtcttcctcaacccccctttaaccaccactaaagaagtctccttgtttattttgttttagccggccgtaacctagtcttttaagtcatccaagacttcttctaactgtccagtctttcttcggaacagatctagcttatcattgacgacttcaatttgggtctcagatactagttctggaaattattattcgataagaccttgtgtctagcaagaagataagttataaagaaccgactcatcatgaattctagtcccattaaacctgcctcttaaccaccaaccatgttgggaagcgcccattattcctttagtttcttttaacaataattgcttgactgtattagcttcgatccctttcatgaaagctattcccccggtcagagaggcttggctttcgaccttgcacgataacctggattcagtgttttaccactatgcaaatttaggccagagcctaaactgaagaccgtccgtcctccctagtgaacaatttacatactatttttggactagacacttaagaaaggaagacttgtgttaggtccttggaaaaaatcatcagccagcacaaatgataaagtaacccccgtaaagttagcctttaactctaactttcgagggttatttggccttttgacttttttaattagttcagcctctttcagcattattcttgaccagagacaagagtaatttattccaaaacacttatcttacttcttttcttctaaaaatttccattctaaggccaatcctgtcagttactgaaatcttcttcatgagcaaaaatagagtgaaggatgtcctctacccctatgcggtaaagggcatttttatggggtgagtgggtcaggcaattccacacagcttgccggtcaaaaacaactccttctaactctttttccatgccttcgattgtcccttcattggaattgtggaagaagtcacctgaaaaatggcaagactggatgatatcgtggttcacatcaatcctagcctggatcaacccaccatccgacaagtaagtgtttgaaagggtgtaggctgggttcttgcccctcacccaagaaaagctttcaaatttttcttgggccaggttatggacagcctggtagtcttcctcagttaattgccccagttttacctgctcgcctaggaaaacttcaaggaaggcacttttgaattcttcctccgaccagtccatctgggtcatattccttatattagccgtccggtctttgactgactgtgttccctttgacttaatcttatattttggtgcgttgagatagagaggaagtttagataaatcggtattataaaggagcgagccgtggtggacggtatacccctctatcccacactgggcattacccgaaatctttttcccatacaaggaaaggtcattacggctattgtactcggcaggaatcccaagtgctcgcagactggctaatacctggtccatataaggtttaaagtcaatctcttgactcttgcctggaataatgaaggaatattgaaaaccacccatatcggtgtatatcgttccgccccccgtatttcgccgggtaatctttaccctgtctttggctaaattagcctgattcagttctaccatcaagttttggaacttgcctaacatgactgtgggctgggtccgccaaaatagaaaaactgtatcatcaaagtaatgctctttcatcaaatattcttctaaagcaaagtgaaaatttgcatccctagactgggtatcgatgtaaatcataagccacaagctccctatgaatgaagggcttcgtgagccttgtaagaactacggacttggggaccagaagcgacaaatttgaagcctttttgtctccctattcggttgtattcaccaaatttttgacggctaacatactctgaaagtggatagtgtttaggagaaggttggaggtattgaccaattgtaaagaagtcaaccccaacagccagacaatcgtccatggtttggtaaatttcttcctcagtctcaccgagtcccagcataatcccagtcttagtgaaaatttcagggtcttgttctttaacgtattctaagaccccaagagaccgttcatatgttgcccggtgacgaatcattggggaaatacgttcgactgtttcaacattgtggttgataatatcgggcttagcctgaataactttatcaatactatcgtggtcaccttgaaggtcggaaatcaagacctcaaccgttacgtctgggcattcttggtggatgagttcaatacatttagcaaattgtccagccccaccatctggcaagtcgtctcgggccacacaagttatcacaacgtggttaagttttaattgcttaacgccatccgccaagtgctctggttccatagggtcaacaggctccataccaccagtcgctacatcgcaaaagcggcagttccgagaacaatgtttacccaaaatcataaaggaagccgtaccgcttgcgaaacactcccctatattcgggcaagttgcttctgtacaaactgtatttaattttaagtccttaaacatagtgtcaacttgaccaacatcatttggattaaagcggacacgtggcttgacactagttggtgttgctgcagaattgtttttgttagttttggcatccatttttatccaccccatcttcatcaatagttccaatgacatcgccaacagtgactgtgtccccttcttctaccttaaactcaaggacagttccacagtcagttgactctatttcatgaacagccttgtccgtttccacctcatagaggacttcacccttgtgaatttcctctcctatatcttttctcagactaatgacgacaccgttttcaatcttctcactcaatttaggaaataaaacttctttttgcatataggtgttcctttccaatttttttgcccaaaggctttctttctttttactgattccattctaaaatagccccctcttatatacaagctttatggaaaaatcaaatgaatttttgaacataataagggtcaaaaaaataaagaccctataatgacagtgtttatagcccgtactatttgataaaagtataatataaatacaattttgtgtctaaaagatcacttttcaagcattttttgaccagctttattttttaataatatattttttatttataattttctagtttattttgcctgttaagtaagcaatttataacaattataaattactccataaataaaaatcgggtttttatagtccaatcaagcataaaaataatgattgctacaagtgaagactatatcaatgtcatcagtccctggctaaatttcaaaatcctagtctagctgaccatgacaattgcgagtcaggacaagcaaaagggatttgcggtatgataagccaagtaatccataaaagatggattttgtaagaaaacacggtaagaagtggcttcgaccgggtagatagccaccctgggaaaaggaatgtaatggttttatttaactatttgtcaaatatgtactaaaatagatataaggaaatttttctatatcgaaaggagttttaacaatgggaaaagtgattgataaggaccagtccattaagatcttacaagatattattcaaattaagtcagaaaacggccatgaagaagaagttgcgaaatacttccaatccttgttagcagaccacgatattgaatctaaattggttcaatatgatgacgaccgggctagcttggttgccgaaatttcgaacggtgaagggccagtcctaggtattaccggacacttggatgttgtgggtgctggtgatgaagacgattgggaatatcctcctttttcagcccatattgatgacgataatgtcctctggggacgtggggcatctgacatgaagccaggtattgcagctatggtgattaactttattgaatttaaagaaagccaaaactttaaaggtaccctaagactcctagcgacagttggtgaagaggttggccagtatgggtctaatcagttaacccgtgaaggctatgtggatgatttggatgccattttaattggagaaccatgtaatgtagggattgtctacacccacatgggatcactaaactataccttgacctctaaaggggaggctgcccactcatctgcccctcaattaggtgtgaatgcagtagaaaacttgactgaagctgtctctcaaatttcaaaagctgttgaagataaggctgaagaatttaataatgaagaactgggcaagactttccacaatgtaaccattatcaaaggaggaagtcaggtaaactctctcccggaatacgctgaatatgaagccaatgcccggactattccggaatttgataacaatggtgtcatggatatcgtaagaagtgttattgatgacctcaacaaaaaagatggctttgacctagctgttgaagtaacagccgaccaaccaccagtgaattcccctaaagattctaaattaatccaaactattcgggaagtcactaaagaccatgaaagattaggcttccaatacctattaaaacaaatgggtcaagttcttggcaccgacctggttaaagaccaacctgaactagggaaagtggatgaaatcctccccatagctattgcagggacaacagatgccgcccagtttacccaaggaaattcaaccatggatattgctgtatacggccctggtgtgccacagcttaaccacaagctgaatgaaagaatacctgtccaacaatacttggactttatcgatgtctacaacgatatcatcaagtcttacttgtcataagtcctggtggttgaatgaaaataacatacttcttacaacaaaagtgttggtagccaccaacactttttgttttttcccagcttaaagcttgcagaggatttctgactgttgcccctaactcccctaacctatccatcaaggggctggttagagagttggatcacttggtcaaagcttacttcagatgagtacagttcatagggtatcataataagggtgatttccgttaagggctgagcctcactcttgcaaactaattggctggccttaattttttgctaacaattgtgtcttgttcgttgtaaacgttaccgtattctactattataaaagtaagtcaaagaagaaagggtgtagacttgtgaagaagattatcaatgacccaggccaagtaattgaccaaatggtaaaagggattgtgagagaaaatgctgaccgactagaccgtctagacggaacagactaatacaggaggaataaaatgagaaaagcctttatcagtccatcaaaatatgtccagggtgaaaaagagctcaataatttaggctactacattgcccaattgggtaaaaaagctctaatagttggtaaagaagaagatattgaccgggtaagtgaccaactggcttatactgaagacaaatttgaagtagaatttgtcaatgcagacttccaaggtgaagtgacccgtggtgagattactcgcttacaaaaaatcttcaaagaaaaccattgcgattgcctggtcggtttaggtggtggtaaggctattgatactgccaaatgtgtagctgaaggtaaaaatgtaataattgtcccaaccattgtggctcaagatgccccaacgagtcacttagccgacatctaccatgaagatggttcatttgatgccagtgcccactttcaagatagcccctctgtcgtcctggttgatacagctgttatcgccaaggcccctagccgctacctcctagctgggatgggggacgctttggctacttactttgaagcacgggctacccgccggtccaactcaaacgtgaatgctggccagcccaatggaatccaagatggcattgcccaagaagccaagggaactaatgcggcctatgccttagctaggctagcctatgacatgctcttagaacatggccaggcagctaaacttgcctctgatttgaaccaagtcacccctgctttagaagacataatcgaaaccaatgtcctactatctggcctaggctttgagagcggaggattagcagcagttcacgccatttatagcggcttttccctcttacacgaaaaaagtgatgcccctgcatggtgaaattgtcagttttgggaccatttgccagttgctaatggaagatgctccaaaagcagaagttgaacaagtcctggccttccaagaggctgtcggcctgcccatgaccctatctgacatcggttttgatgatatgactgatgaggaactagaagctgtagcagaaaaggcaatgaatcccaaggggtcgatccagtccatgcctttcgatgtgacggtccaagctgttaaatcagctatcctaaccgccgatagattgggtcaagcttacaagaaaggataaaattttcaaatcagctctgccttcaaccaaaccatggcttgcttttcctttttaaaattatctcattttactcaaaaagccctcccttagttaccactaaaggagggcttagctgtctatttggttgtactgggcctagtcttttaattcagccaaggcatcttctaactggcctagtctttcttcaaagaccttcatggcccgctcgatataagccttgttggtcatgtctaccccagcttttttcataatttcaattgggtagtcactgtcaccggatttcaagtaacctaggtaggctcctaaagcaccatcttcttccttaactagcttgtcagccaaggcggtagcagcacagaagccggtggagtattggtaaacataatagttcatatagaagtggggaatacgagaccattcaaagaaaatttggtcatcattgacgacactatcaccataatagcggtcatttaattccccgtaggtttggttgaggtagtggccggttaagggttgtccctctgcagctgcctggtgaatatggtgttcaaattcagcaaattgagtttgtctaaaaacagtccccttaaagccatcaagatagtggttcaagacatgaacccgagtgagggggtcttgagcattttctaaaagatagtgggtcaacaagttttcattggtcgtagaggcaatctcagccaagaaaattgggtaatccccataaatatagggttgactattgcgggtaaagtaactgtggacactgtggccgagttcatggactagggtatagaggttgtccaaggagtcgtgccagttgagcaagacataagggttggtatcgtaaccacctgaagaataagctccacttctttttcctttgttttcaaccacatcaatccaccggtcctggaaggctcggtctaaaacagccttatagtctggacccagtttggctaaactcttgtaggtttcttccctagcttcttcaaaggtatatttcaaggaagactccccagcaatcggagtgtagaggtcatacatgtggagttcatccaagcccaagacttttttgcgtaaggccaagtagcggtggaaaagaggcaaattgtcattaacaacttcaatcaaggtctcatggactgattctgggatattgttattagagagggcctggtgtcgggcagagttatagttatggacccgggctaggtagttgtttttcttcacttcggtctggagggtggaagctagggtgttgttgaaggattggtaaacttcatacaacttttcaaaagcttgtcggcggacattgcggtcagtactctccaataattgaccgtataaaccgtgggagagccggacctggtcgccctcttcattttgaaccaaggggaaggttaagtctgcattgtttaaaatattaaaggtttggctaccgcttgaaaagatttcagaggcccctgctaaaagaccttccttgtccgcatctaggacatggtcttttttggctagttgctggttgagttcatgacggtatacttccaagtcagggttttggtctaagtaagaagccaccttgccttcttccaaggccagtaattcaggttggaaccaagctgtagcagtagcagcttgggctagcaagccccgagctcggtcttctaaggcttggtagtccccattactggtgtcttggtcatgttttaagtgggagtaaacatagacactttcaagcttgcggctaaggtctaagttagcttccaaggcttgttggaaggccttgggtccctggtctaaagtgccttggtactgggccacttctttaatttggtctttcacttcttcaaaggcttcttcccaagcctggtcactagcaaaaattggggtcaagtcccaggtcagcttagggtcgacttcctggcggctaggtaattcattttgactcataagtgtattcgctccattctaatcataagctcatgacttaataggcctattgtaacataaatcattttagcttgccttaaaagtgtttgttttccatatgggctaatcaatgatgtcagctgcttcgtcttctgctaggaattcttcataggtcaagtcgttttcaaagagatagctagcaagttccgggccaaaataccggtaatgccaaggctcaaactggtagccggtaatgtcttccttgccttgtggataccgcataatgaagccaaagcggtgggcattattagccagccattggcccggttctgtatcaatgtaagattcggttaaggcatagtcaacttctggcgaggtaatatccatggctaaacccgtttggtgttcactggttccggcttgggctgaaaaggtctgggctgcttccaagccatttgcttggacatagttggcaaataggtctgcctgggtcgcgtaagaccggtagcctgaccgggcaaaaagtttaaaaccctgttcagaggcttcctggaaaagttccactagttggtcagctgcctcttgtcgcaattggttggcctccgaattatcaaagacagtgggtacttgaacctggacaaggtcactaggagcatagtcttctggcaaggaatggtctttgttaaccaaggctgtgacatggctggggttatgaggatggacttggatggaaggagtttggtcttcttcaagctctttgtcgtccccagcttgatctgctcctggcccttcttccacttgggcttggtctaattggttaaccggcccttcttttgggccacaggctactaataggcttagactggctaggatagtcataagattcattatttttttcattgctatcacctcttctattatgccagagcctaagcctaaacacaaaattacttatccctaccaggtcaaactttctgccaactgactagcttgttttggactaagattttttggtcagttaaaattcccagataaaaagtcaaattttgaaataccaacttttctgccagaccgtctgtctcataaatctgcaaatgcccatcctgaaccagagtcctcagtaagtctgccaagtcttttagcctgatggacttggcctggggtagagattcgacccatttgaagacccggtacttccattcataagccggcgtcacgatcaaccagtcataagggcaagggtagaagatccaatctggcaaggctagtaagtggtcatggtggctgtaaagcagttggaaaaatggtcgggcagacttggccttgtggtagtggagccgtttaacttgtcttctttgttgacttaagtacagctggctgggcgcttttctgctagcctgggctaatggatctgccagctgcttttgcttgggaaagtcttttaagacctggttttgccaggttaaactctccccagtcaaaaaattatagtggacatgcaaactcttttgctttaagtctaaacttaaaaggctggggctagtaaagaggtgggagttcatcatggcccggtggagggttagtaacttagttcgtaaatgaaggggcggccccaggatccagaggactggatagccaattcttgtatagcctgccgtccggtctaggatttgttggacagaaatggggctacactggaattcgatggccaattttatcctccctccctcttgggagaggaggaggtctggcctttggttaatttcctgaatgggggcttctaggtcaacctgggcaaaaaagcccttgaaataattggctaaaaaccgcttccctgctaggtggtccctcgtttctccttccgaaaaaccctggcaggtggtctcttgaaagtggcaaaagtgggccatccgcttggtccccttctttaaaaagacccggcctcggcaagctggacagtaatagtcagacccttgccctggatctaattgaccagcatcgattaacttcccctgacggttgatggctagtaacataagaaaaacctcctccctatacaatacgcatttttctggaaatttcattttataagagaggaaaatatgctaaaaaccccggttaaaaccaggcttgctgcttagttgttattatacttggataggcttgcaagcttttacatggaataacactatcccaatccatttattagttgaagattttagtttatactttttttattgaatataagaatcgacatgacaagcattaggacactggctaagatagtaatccaaagactaggataaaaataacttagttctagcacacccttaatgatatccatatttttgctagctagggttattgggttatatttttgaactttatcaaatacatttacaacaagaccaaaaatgataactagagccgtcaatagcaaatgcccgtaacttgattttgtcagtaaagaagctaaaatcaagaggattagtaaaaatagaccaaataaccaaatacaaaagaccgaaaataaaacatagttatggtcttggtcagggaaaatgttaatcgtgtagacccaggttatagtaaaggagactaagatagctattgtccaaaccaagcttatgatactaattttggacaatataacggcccttcttttgaggcctttcgttagcatattaattagacttccgctagttagctcatttttgattatcccgttaaaagttatgataaaaacaagtaaacccatctgttgggtattcttaaaaaattgctctagagagtcataggagctgggttcagctaggtttatttcaatgttggtttggctaagattttcgatcaggtctggcattattttggcagtaaagggactcgagataccaattattgcaaaaacgaataggatgaccaagagctttttggttcgaacactttcaacaaattcctttttggaaaatacccaatactgtttcatccaaccacctcttcaaacaagtcttctaaagaaatttctagtttttcaaatttcaaggggactagacctgtctgattaaatgaatcaaggaggtaggtccccccaacttgcttgttagcaaaatttatcataagtgaggtcttgtctctttcaaccgataatttttctttgccagatcttaggaagtcatcaaaatggtcgcagtctttttggctagaaaattgaaccaaatacttgttctggtttgtcctagacaaaaggtctcctatacccccttggacctggatacatcccttatctaaaaaagcaactcggtcacatactctttcaatatcacttagaatatggcttgaaaacaaaactgttgtttttccctttatggatagtaagatatccagtatttttttacgtccaattggatcaagggctgaactaggctcgtcacagatcaaaagttttggttcattgattaaagcctgagccaaacccaatctttgcttcatccccctcgaaaaagtcattatttttccatgttcatcgtttaaaccgactagatccaatagttcttctgacttttcaaccctttttgtcttatgaaggccagagatttcaccacaaagtcgtaaatactccttagccgtcatataaccataaaaggctggaacgtctggtaaataaccgatatgacgattggtcttggtttcaccatacttcactttttcgccacaaacaaagacctcccctccactagcttctaataagccaagaatgatattcatggtcgttgttttacctgacccgtttttccccacaaaaccaaatatggacttttctggcactcgtaaattaacttggtctaaaactttcttttctccaaaaatcttggatatttctttcatttctaagatagcagtcaactctgtttccccccctccaaaagcaaaatagacgatcggacctatcatttgaaatagcaaaataactaatgtccacaccaacttgctagcaggagtgtagtgactatgtttaaacaagtgtattaatgcagttatttgaagaataacttgaatgatgataagaggcagtataaacatccaatattctgacaaaattgtttgtaattcatccattagaaagtctccttgtatactatttattcttgtaattatctttcaatttatttagtatggattgatagtcatcccgatctttcaaacccgaaaacaaaggattatctgcaagagcttcataattactttttcgaatcacacggctatccctgggggctgctcttccaattggaaagtcttgcaaccattcttctatcttggtaaaaaattcatcacctttgagttcaagtgggtatatgttgcccgtaacgatatgggtgtagtcttttaaataagctaaactttctcttgtcatccctattttcatgtattcttgacctagtaacagataaaaattggcaagcatgtcaggtcttaattcttttattttgaaagcccttgcgatatctaggtatttttcggtcatatctttcaaatccgatctatccccttccaataaggggatataagataataatagctgtaaaaagttaattaaaaattggtagatttcaatttgcagactttgcatggctttttcattcgccccaaccatctcatatgcccgagaaaggaggggagctggagagacaagttccctagtgatctcttttaataaggcaatagcttgctgtggttcattgagtgtgagctggcacagggcttccgataaagttgcttggttaattaaattgagttcatcacattcaagtcttacccgttgaaacaagtcttttgctcgtgaaaaaacttgtaactgtttttctatactgcctgctaagttactattatttaaatataagttggccatttgaaataagagagggtaacaagaatagtattttttgatgaccgtctcacaatagctgaatacatcctggaaaggaagttcagtaaagtccttagcacattttaggtataatgtcctaatattttccttggacatttgcggctcatagcccattaattcatcaatcgtaatatcaaaatagcttgccaaaaggggaagaaaagtaatttcaggaaaactgtgtcctctttcccacttagagacagatgctttggatacgccaataaaattagccaactcttcttggttaattcctttcttctgccgacactccacgatttttcttgatatattaaagttatccatattcttcctccttttcttaattttataaggagcttataggactctcaagcgatttatagttaactaccccataataaaaaaccccggccaaaaccggggtttgcttgctaagtggttacttagtcttcaaaatacttggaaagggtcccaagagcatcttgttcgataatgcatttgcaatgctcttggataacatctttagttacttgactttcctcaccatattccaaggctttggcaaagagaagttcacggtagctttcattggtatcctcttcttctccttcaaaggccaagtagaggtaataggtctggtcttggtagtaaagggaggaagaaatccagaaactatcaatatcatgagctagtaggataactttttcgatgtcatcaaaagaaataattcgctgtaggtctggggccacttgcttactgccttcttcatgatggtcaaggtcatagtggtagtcgccttcccccgtcagatagtcgtcaaaggaaagattagcctggtcattaaaatggttgataatgtcgtcatcaacattggcccccttgctaataaagagttcaaggccattgtttttgggcatgacctggaaggtaaccgcattagagtctttaaactcgtcatctaagtcgacctcttctaaaattgagtagaagaaccgctcaatttgcttttggttgctgagtaaatcaaggaaggtcacaccacgttcaatgagatctgagttttctattttaacacggatggtatcctcatttatatgttcgatttccatatctcaagcacctcatttattcttttacaccaaatatgtggtcctaagtagattacattatactaaaaatattgccattaaacaagcaagtcagcccagttaatattgctttaaagtttgttttttgccataaaaaagagtgataggttattcctaccaccctctcaaaaaaggtcacttgaacccagctgcttgtaacaagtttaaatcatgtcaccaagcaagccattaatattcaactgttaatttggctggggaagtcaggaaactatttaagaaattttcgtcgtagccaaccaataggcgtttttcatcaaataacatgggcaacttaataagtttgggttcttgtctgatataatcgtacaattcttttatcgaaatatcatcggctaagaccacatgtttgacgactgaaaaatattcatccgcgataatatcctgagcccctaattcagttagggaggtaatctgctttaattcttcaatggtcatcaattggtcaaataaatttttctcagtgtaggccagttggtggtcctccaaccaagatttcagcttgttgctttcaattgatcctggataggtaaaaagtttaagcatggcaattcccccagcaaatatttttaaagaaataattagtagatcaaatcaaccagttcagaaagctcaacatctccaaagtatttatcaatatccacctggttcaaagcctcttcaatggctttagcctggtattggacccctcttaacttgtcttccacatcagaaatttcacccatgccgaaaaagtccccgtaaattttgatgtcttggattttaccagcatcaacatttaatttaacttcgacagagccaatagacaagcgttcacttctttcaaggtcaaagtctggtgattccccgtagttccagtcccaattaccagtatactcgtctctaaattcttcaatttgttcccagtcttcatcagtcaacttgtattctttcacatcttcggttgagtcaacaccaaagatattcagtaggattttttcgcggaagcttttagtattcaagttttggtattcatcactcaagtaaggtttgatgttggtgacccgacttttaatggatttaacgcccttagattccaacttgtgctttttgggcttcaaggcaccgacaactgcatcaatttgggagttaaataacatggtaccgtgtgctgtcatccggccatcttttgagtacatggcattgcctgagaattttttatccccaatgactaagtcgttgcggccgcggagttcagctccggaaacacccattttttgtagggcatcaatcacaggatcggtaaattttttaaagttacggaaggagtccccgtcatcatccgtcaaaaagcaaaagttcaagacacccaagtcgtggtaaactgccccgccaccacttaaccggcgaaccacattgaccccgtgttcttctacataggaagtattcacttcttcataagtgttttggtttttcccgacaataatagcattatcattgatgtaaaaaagcaagatcggttcgtccaagtgaacatggtttaacaagtggtattcgattgctaggttggtagaagcatcatgaatttcttttccatcgcgttcatttttaacgtaatacatttcacttttcctttcctttttagttaactctagtgtaagacactttggtcaaaaaatataggtttaaaaaagaaaagcgaaaatttttacttccttaagccaagccaagtctaaaaagtggttgaaaaaacacaaaattgttcatcctttttttgtgacacaatttatttaacacagaggacagtggttttatttgatacaaaaaaagagactgaacaaacagttcaatctctctccaccaaagcttagttatttgcaatagcttctttggcttggtcggttaaagaagcaaaagcttcttcatcgttaacagccaagtctgctaagacttttcggtttaagtcaatgtgggctaatttcaagccgtgcataaatttagagtagctcaagccgttcaagcgagccgctgcattgatacgggaaatccaaagcttacggaagttccgcttgttcactttgcggtcacggtaagcatacatgtgggatttcatgacctgttgcttagcaacacggtataatttatgttttgagccgtagtagcctttagccagttttaaagtacgtttacggcgacgacgggtgacagtaccacctttaactcttgccatctttttcttcctcctttactagcttacttcatgtaaggtacttgttgtttaatacgtttgtagtcagaattggcaaccattgaagccttacgtagtttacgtttttgtttttgggttttattggcaaacaagtggctagttttagcccggcttcgttttaatttacctgagccagttcgtttaaaacgtttttgacttcccttgtgggttctcattttaggcatacagtatcctcctcttgtgacgcagtcttatttttcgcttttaggggcaatcatcataaacatggaacgaccatccattttagctttggattcgatatcgccaacgtccttggtctcttcagcgaaacgctcaagaacctcacgcccgatatctttatgagtgattgctcggccacggaaacgaatagaaactttaactttgtctccatccttgtctaaaaacttacgtccttgcttcaacttggtattgaaatcatggtcatcaatcgttggacttaagcggatttctttaacatccactgtcttttgatttttacgttgctcacgttcttttttctgctgttcatagcggtatttgccgtagtccatgatacgggcaacagaaggtttcgcatttggtgagacaaggaccaagtccatgcctgcacgttctgcagcatctaaggcttgctggcgtgagacaacaccgatttgttctccatcatgtccgattaatcgtagctcattgtcgcgaatgcgatcgttaataattagctcctttatgatgatccacctccgaaagtatttgtgaaaaaacaaagaacggaactctgtaaatccatacagaagtcccgttcagattaatttcattgtcaaaacttggcacaagatatggccaagtgtcgtcaatctgatattagcccatggacaagatccattaggcgagaagagggacttctactttgttttctcaacgtttactactatagcaatatctgcttaaactgtcaaggataattttagccctttatggcaagagtttttggactattgggtcaataaaactggccagcatttatttgcctaggaacttgcggaccgcttctaagtggtctgggtgcttggaagcatggtgcatgttttgggcttcagctgcgttaaagtcatccagttctgggtaaaagatgcgggcaaagaggtctttttgtagcattaagccattagtcgatagtttagacaggtcgtgggccaagtccaaggcagcttgggccaggtcttccttgtctacaatcttataggttaaattgtattcctgagccagcttagcatcaatgggtttccccaacataacatgttctttagccttaaaggtgcccaaggctttttgtagggtgtaaattaagctagtatcacctggtagggccaggtggataaaggcactgtggaggctagcttctttgtccataataataaagtcactagccaaggccaagccaaagccagctccagccgctgccccgttaacagctgcaataacaggttttttggctgtcaagagacttttagccaggcgaccggtttccaagatatcctcttcttccatgacttggttattctctagcatcttgttaaactcttgaatatcgccaccagcacagaagtgtttgcccttaccagatataatgaccacatcaacctggtcgtcctggtctgccatggccatggcttccctaatttcaccgtaagtggtgctggcaaaagcattcccaacctctggccggttcaaagtaatgtaggctatcttgtcttcaacatggtagtcaatagtcggaaattctttagtcattgttggacctccgttttgtatgtaagcgttttactatttatctacattatacacaggaatggcttacatggcaaggatgatgttaaaaaggttgtcaatgagattttaaattcaagctattattaggccatggggttataaaaacgacttccatttagaattaacatcatgatacctagcagaacaagtaaaaaaactataattatgcagactatatctaatcgactaaagggtttgtatctataccaagttcgttgttttcctttaccaaaacgacgtaattccattgcattactaaccacttctatccgatctagactattaaaaataatgggtaagactattcccgctgtatgttttaaacgatctaatataggagctttgttagacatttctattcctcgagcttgctgagattgtttaatgtcataaaactcttgctgtatatcaggaatatatcgtagtgttaaagaaacggcgtaagaaatccgatatgatagaccaattctatttagacttgaggcaaactcactcggattggtcgttaaaataaaaataaaagctaatggtattgtggtgaaatacttcaagagaatattagcttcataaattaattgttcccaagtcaatgtatatcttcctatgccttcccatataacatttctacttccaaaaatctcaacaccttgctcaggagcaaaaagataaatagttaaaagattaagactcgcaaatacgattaccaagtaaacaggaactttgatggacctccatgatacatcagcttttataaagaggcacaaacttataatgccaactaaggtcaaaaatcgtatatcataagaaatcatagtaattaaagataatgatagaaatgcaattaatttggtcgtgccatttaacttgtggataaaggtagtacctggttgaaagcccaaataactagcttgactcacgatagatcaccttactttcgtaatccatgaacttctgaataaaatcttcagtagtaagactcgttaagtcttgacctaaataatacaaactggtcggtactaaatctgatttggtcattagcctatgattacttaaaattactgcgggagtagtgtcagctaataaatgtccttggttaaagactaaactccgtccagtatactcctgcattaaatgcatatcatgggtgatcattaaaatagttaaattttgatcacggtttaacgagtcaacaaaagtcatgaattgagtataattgtaataatcttgcccagcagtcggttcatccaaaatcaatatttgtggttctaaaacaagaatgcttgctatcgttaccctcctcttttgtccataggaaagggctgagataggccaatttctcatcggatatagtccacaaatacgcaaagtttcatgaaccctttttataatctcatcactagcaattcctctatttttgagacctagagcaacttcatcaaaaattaaattctgtgaaatcattgagttaggattttgcattacgtagcctactcggtctgcaatttcttttatggaatagttactaatatcctgtcccattattgctattgttccttttttaggtcttaggaatccacatattacttttgctagggtagacttcccggcaccattcgaacctactaagctaactttatctcctctacgaatttcaaaactgatgttctggagaactggtgtcgcttgatttggatactgataggtcaaattttctgtttttaatattatttcaccacaattattttcgtcatttctatgtattgattgtgcccacttctctactttgtttaaataatttgggtcaattgtggtttttcggtagtgtccgatcgattcaatttcgttgatgtctactccagcatatttaagtgcttgtatatacaatggttgccttaaacctacttgacttaaaaggtctgtctttaataagtcactaactgatgtgttagatactaatttaccttcgttaagtaaaattacttggtcaatgccagctaataagcactcttctaaacggtgctcgattataacaaccgtcacacctaattctttgtttaaacggttaattaactcaatcgttccttcccctgaagctggatctaagttggccaaaggttcatcaaataacaatataggaatatcatttactaaaacaccaccgattgaaacacgttgtttctgtccaccagatagattatgaggatttttttccaataaattttcaatatctaaagcttgactccagccttgtactatatccttcattttagcttggtcaactctatcattttctaaagcaaaggctaggtcttctgctacagtcaagccaacaaattgtccatctgtgtcttgtaaaactgtccctactactaatgacaattcaaataatgaagttgaccgaggatcaactccatttacctgaatattcccttgtaaatccccaggaaaagcgtgaggaatttgtccattaatacatttagctatagtcgatttgcctgatcctgaaggtccaagtatcagaacaatttcaccttgttgaatttgaaaacttatatctattaggctaggttcagcttggctatcatactgaaagctaacctggtcaaaggaaatgatcggttgagtcattttaatcttcctttttcaaactaccggattgactacgtgtagaagcgtaggccttaataaggatagtccctagaacagctacagctatagaattcattaaagcagatacggcaccttggataaatactttattagcaggctctgcgtagatcagaatgtctaataatggtgctacaagaagccaagataaaatatttacaatcacttgaccaatattaaatttaaccatatcttttttagtaaatgtacctttctctacttttaatgttttcccaacgattccatagccaatccctgttacacctgaggctaaaatccaagaccaccaagctccataagttaataaatcttttatagtgtgtccaaggaaaccgattagtgcaccagctaaagggccaaatatgaccgacattaaggataaaaatggataagtagtttcaaaactggtattaggaataccaactggaatagataaaaacctacccaatataaaaaacactgctgccccaataccaatggctactagggtggttaaggatgatttattgctcgcttgcatttactttcctactttctctattaaaatgagccagtcattgccccgacctatattataggtttccgaaaaactcttttggttgatggcaatgcccaagtgaagtaaagaattgatataggcaattggttcaccgacttggacatctgcaaagctatgaccaaaccgcatataattctgatacctttgaaccccatcatgttctatggtcacctttacttgatcacctgattgaatgctaagttcctttaaaagtctagccggaatattagtccataatgagccgaaccgtatgtcaaatatatcaataaccccctcaatcctagtttggccatcagagttcgggtctagaagttcaagactttcaagcgaatttaagggaatggcttttaactggtcataataagtctcgtcctcagccagtaaagcaccattatatacatagatatctcggccatggaaggtgtgactcccttccgaatgggccaggcggttcactgtttcatcaatttctttcagtgattcaaggccaatatatttatggacatgggataaggtaccattattgggtgttacgatgtagtgacccgattttaatttagccaccacactttgccggtcagtgccgacccctgggtcaactacggaaacaaagactgttccctcgggccaataattgacggtttgaattaaacgataggagccatcaaatacattgtaaggattaatcccatgagttagattagagatagtaatgttaggggctactgaataagccacaccatacatggcggcaactgccccatcatccaaaccaaaatcggattgcaagaccaaatgttttcgactcattaacctgcccactttcatcattattattcatataatacacctttttcatgagataagcaaagcaattatttactaaaatctcattaaatagaagacttggtctggtaaaagtcaatctgctagttggtcaaatccgtccttcttgtaaactaaagaattggtcaacacagaagccatctattttttagcttggcagttttataaatgataaagtacttttgaagttgaaacctacaagttgaaactggacaataattcagaataaggaagttttgtagttaaaactggacaataattcaaaataaggaagttttgtagttgaaactggacaataattcaaaataaggaagttttggtgtcaagttcaaaactctggccaagtcaggctaggtcttggatctgtctagtgataaacgtttttctcaaagttctacaattgctcggcgattgtagaatctccaaaccaaaattctacaattacttggcgattatagaatccccagttaagtccatgtcaggtctgaaagctgacaatgggcctgtgatatagagccaacatagagacaaccaggctaggataacatcctagcctggttgtttgtgtttatcttcaccgatttaagccgtcacttcctggctcttgctggcgatatctttttgaatgaggtccataaagtcttcaaattggagggttgggctgtctttttgcccgtacttacggaccgagacagacccagattctaactcgtcatcaccgataaccaattggtaggggattttttgggtctgggactggcggatcttgtagcccagtttttcattccggtcgtctacttggacccggatgccttgagctcgaagcttgctagccagttccttgactccttccaggtgggcatccaggttcaccgggatcaggacggtttggattggggccagccaggttgggaaggctcccttgtattcttcaatcaagtaggcaatgaagcgttccatggttgacacaaccccccggtggatgacaacgggccggtggtcatcttggccatcttcacccacataggtcaagtcaaatttctcaggcaagaggaagtcaagttggacggtcgacaaggtctcttctaggccaatagcagtcttaacttggacgtctaatttaggaccgtaaaaggctgcttcccctgtcgcttcaaaatagtcaatatctgcttcgtctaaggtttcccttagcatgttctcagctttaacccacatttggtcatcatcaaagtacttgtccttgttgtcagggtcccgcaagctcaagcggaagcggtagtcagtaatattgaagtccttgtagacttctaagaccaggttgactacccggttgaactcttctttaatttggtcgggacggacaaaaacgtgggcatcgttcaaggtcatttcccggacccgttgcaagccagacaaggcacctgatttttcataccggtgcatctgacccagctcagcaatccggattggcagttcccggtaggagtgggtggcgtttttataaacctgcatgtggtgggggcagttcatgggtcttaagaccaacatctccccatcccccatgtccattggtgggaacatgtcatcttggtagtggtcccagtggccagaagtcttgtagagcttagcatcagccatgattggggtgtagacgtgttggtagcctaagttaatttccttgtctgtaatatagcgttcaattacccggcggatggtagcgccttttggcaaccaaaatggcaggccagacccaacatctgggttaagggcgaagaggtccaattctttgccgattttgcggtggtctctttctttagcttcttctcttagacggagaaattcatccaggtcagactgcttgaagaaggctgtcccataaaccctttgcatcatcttgttgtcagaattaccccgccagtaggcacctgctagggacaagagcttaaagaccttgatatatttggttgaggggacatgaatcccccggcacaagtcaacgaattcaccctgctcataaatggaaatcacttcatcctctggtagttcatggatcaactctaacttgtaagggtcatctgcaaagaggtctaaggcctcttgccggctaatttctttccgaacaataggcaggttttctttaacaatttttttcatttctttttcaatccggccaaggtcttcttctgtcaggggctggtcggtatctgtatcatagtaaaagcctgaatctatggcaggtcccaccccgaacttggcttccgggtaaaggcgtttaatggcttgggccattaagtgggccgctgagtgccgtaggatagacaaggcatcttcgtgtttatcagttacaatttccaagtcaccgtcttcagtcaagggggtttgataatccaccaagtcccccttgaacttaccggctaggccagccttggccagagacttgccaataccttccgctacctcttgtgtggtcggttcatggtcaaaacttttaacagacccatctggcagggtaatattaatttgtgacattgtttttcctcctcaaaaataaaaaagccccattaaccaggctagcctagttaatggggcgattagtcgcggttccacccatcaattagcaggaagttaaagcttcctgcccttgtcaagatccttaacgtggatcaacgccagccttgttttcagctgaactcggaaggggtctcgacctttttgtttggaaaagttccagcaatctttccctctctggtaatatatcaaaggtgagttaacttcctcgacgatttaacctgttattaagtgtagcctatcagagttaggaccataaagcaatcacttttcgcttaatttttgtttattgacttgtgtctttggttggtcccagtcatctctacctcttcagccaagtagcggacccgttccatcaaacgggcagccttgaccggttcactccctcccctgacctgggccaagtgttcttcttccaactgtttcatggaaatgttagaggtaaagaaggtagataaattgtgttgcatccggtactggagaataacgcctaagatatcatcccgcaaccaggcagacatagactcagccccaatatcgtcaatgattaaaatttccgtattttgaatagcatccaacttgtcattaaccgtattatcccctatcgccgacttcatatcggaagtaaaactcgggaagtaaaccatggacacttcaaaacccagctcggttaaagttttggccatggctcccaagagataggtcttgccaaccccaaaagacccatagaggtaaaggccttggtggaagtctttagggtcagccttgtaagcttccaggaagtcaattactttttctatagccttcactttatcctggttataaaagaggtcgtcaaagttagcctcttggacttccttatcgatatagtaggttttgagccggttttgactggcctgttttttctggcggtcaagctcttcctgactagggacatactccactaaaattcgcttgttgtgaaggaccagcttgggatagtggccccggaccacgctctcagccccagctgtttggtcagccttaaaccgttttttttcctggacgaattcatataactttgaagcagactttaaaaccgcttctgtgtctaaattctttcggttggcctctaaaaaagctttgacatcaggatccttgaagaccttttcctttaatatttcctggtatttttggtttaatcgacggggattcatcaacttggctagctgatcttgaatgctttccattaggattctccttcacggttcataatatccttgagccgggacctcatatcactttcttggtctgggtcactttctggcgactgacggttgggctgggccatccaagcaggccggctttcttgcttacccattcttttagatggtttagaccaggattttctcttggactggcggtttttttgccggtttaaatagcggcccttgatcacttctagggcatcttcagcgctggtcacccctttttgggcccagtcatcagcaattttcaaggcaaaattcttactgacctgggtattgtttttcacgactaggatatagtggattaaaatattcaaaacctctttaggaaatttggcatagtccattaattccttgattaaccacttctctgaagaagaaacaatcccatggcgttggtctttgatggattttaagtagtcatacggcgacatggacttagccacatcaatgatttcctgaactgggtctcctgccactgaaccgcccttcctgtccttatcctggtcgtgaccttggtctgaaacaagctgggcttgcagctggttggccttgcctagccggttgacttggcggttcaaaaccttttgtaaagactctgcttctacttggcccgtttccaggtcagctgcttctaggacagcctggcggacctccagttcattaaagccgtaagtaaggtggtagatacggatgatttctttgatatcctcgcttaaaaaatcatggctaactaactgcttactcagcccttcttggaggaagtcccagtcaaagcttgtcatatcagcctgacttagcgaaaagtcgggatgatcttctgggctggttgaacttggagccttgacatccccttgtttgggttgacctggtaaacatccaaaaaggacttggtaatattttgataaccctcttttgacctcaagtcaggtaacaggcgagaccggtaggaagcaaataccttgtccccaacagcatccttaaggaggacacagagcaagggctcattaaaaaagctagtagcagacaaggggggatggagggtgtagatataatccttcatttgatttttgtaaaccgacaagagccccatagcttcaagtcgaacccgagcctggtaaaagtccgctagcccaagtccaagttcagccagaagtcgagactggaggaggtcagcctggtccaggctagccttgtctatataagatttcaaagttaaataaagggaaaaagcatcagccttgatgatgggtttgtagaccatggtcaccagggtcacatcttggtcggaaatggcctggctggcttcaatagtaatatagtctttcggatccagtccttgccacggatacgccacacttagtctcctttgcttactttttcttgtcttctaaggccttcatctcttctaagaaaacgtcaatatctttaaattctcgatagacactagcaaaacggatataagccacatcatcggtctgggctaactcgtccatgacatagttgccaatttcagttgagtcgatctcactgacaccctggtcccgtacctgacgttcaacatgagagacaatcgcctcttggtcctcagcagagatgggtcgtttttcacaagcccgccgaatccccctcagtaatttttcccgggaaaattcttcccgattaccatttttcttaacaactagaatagccgactgctcttgccgttcaaaggtcgtaaaacgaaagccacactcttcacactcccgccgcctccgaatagccttaccctcatctgccgggcgactgtcgattaccttagtgccattatggttacatcttgggcataacatttgaaccaccctttatcatttatcttcctgtagatttgttcttgtcagggtcattatatcacaatctagagccattcaggcaaaaaagctagctattcatggactgagaagagagggactagtctactagacaagccggctagtaaaggtcaaacaccggctaagcctagttaggggcaaagtttatcttcttacaagtttttaaaacccttttgatccaaccaagcttcaacctgctgacggctttcttccttgcttccgctgttatcaatgacatagtccgccaacttcactttttcttccaatgacatttgggcctgaatcttgcgcagggcttggtctcggtcaatcccatcccggtccattaaccgactcacctggtcctggtagggaagcgaaaccaccatgacggcctggtagtcgtctgcctgacctgtctcgtaaaggagggggatgtctaaaactaacaaatccaagtcttggcctatggcagttttaatttgattttggatagactgcctaatcaaagggtggaggatccggttgacagcctccttggcctggctattccggaagataaggtcgcctaaatatttgcggtccaagcccccatcctgggtcaaaatctcctggccaaaataatcaacaagctggtctaagcctggacttccaggttcaacaacctgtcgggcaactcggtcagcatcaaccacttggatacccttttccttaaaaacctggctaacagtagacttcccactggcaatgccaccggttaggcctaacaaataggtcatggacaaacttcctttccttttattgctggcagtgaggacaaaaatgagtccccctaccatttaacttgatctttttaatcggttgatagcagcgcgggcaagggtctccttccttaccataaacttggtggaagtcctggtaggtcccagcctgacccagggaatttttataggaccggactgtggacccccctcttaaggtagcctcttggagaatcttgatggctgcttggcgaagggcttccacttcttcattagtcagcgacccacctggccggtctggttggattcgggcttgaaacaagatctcatcagcgtaaatattgcccactcccactaggagtttttggtctagtaaaatcgacttgatagccctggtcttatgggccaaaaaagtaagcatccactccagggtcaagtcttcaaaagttggttccggccctaactgggctagggacttgtgctgggcttccttacctttttcaactaaactcatccggccaaacttgcggacatcttcataccgcaattgagtcccatcacgaaagttaaagataacatggctgtgcttggtgagaggagcgtcttggtctaggaggccatacttgccctccatcctcaaatgagaaatcaacacatcttggtccaggtaaaacaagaggagcttgccccgacgcttgacctggtggatggtctgacctaggagccttcttttaaactgggagactggtttaggggattcaataatattgtcccagtagacttggacctcctggatggtcttgcccaccacttgggcctccaagccacggcggactgattcaacttcaggtagttctggcaagtgatgacctctttctaattcaaaaacgatttataccttatttagcttcaaaccaggttgggccggaattggaatctaccttgagcggcacatccaagtcaaccgcctcttccatgacctggctaaccaatttttctaatgtttccagttcggcttcaggcgcttcaaagattaattcgtcatgaacctgcaagagcatggtcgcctctaagccttcctcttcaatccgctgggccatttggatcatggctaccttgataatatcagcggcactcccctggatgggggtattcatggccgttctctctgcaaaggaccgcaagttaaagttgcgggaattgatgtccggcaggtaacgacggcggttaaaaatcgtcgccacatagcccttgtccttggcttcgcgaatggactggtcgatatagtccttaactccaggaaaccggctaaagtaggtgtcaatataatttttggcttccttacgggaaatatttaggttttgcgacaggccgtagtcggaaatcccataaacaatcccaaaattgactgccttggcctcccgtcgcatattgcctgtcacctcatccgggctgtccaagccaaagatttgtagggcggttgctgtgtggatgtcttcgttatttaggtaggccttgatcaactcttggtcttgggacatgtgggctaggacccggagttcaatttgcgagtagtcggccgcaaagatctgccaaccttcttttcttgggacaaaggccttgcggatcttactcccttcttcggtcctgatgggaatattttgcaggttaggatcgaccgaactcaatcgtccagtccgggccactgtttgctggtagcgggtatggaccttgtgagtgtcggggtccgcatcgttgatcaagccttgaacataagtggactggattttagcaatagtccggtactggagaatgtattccacaattggggcctggcttctaagtttttctaaaacatcctgggcagtagagtagccggtcttggtttttttgataaccgggtaacccatcttttcaaaaaggatatgggagagttgcttgggtgaattaatgttaaattcttccccagcctcgtcaaaaattttagcctcaatttcttttaaccggtctgagaattcttccttcatcgcttccagccggtcaatatccaacttaatgccttggatctccatatcagccaggaccttggccaagggaagttcaatttcataataaagcttgtcttggtctttgtcgtggagctcttcggtcaattggtcagtcaagtccataatagctttgaccttgctggctaagtgggcatacatctggtccaagtcatccgggatccccttgcttttacccttgccatagaccaccacatcagacaggacaccggtgtagttgtgcttgctggcaagatcatagaggttgcccccgctggcatcttcagaggttaagaggtaggaggctagcataatgtcaaaggcaatatggcctacctggatgcccgaccggtttaagagggcaataagggccttggcatcataggtattcaagctgacatcaggattctcaagccagtctctaaacatatctgactggagggccgtgtctgggtctgtcacgtaaattcctgcctcactcccccaggcaatggcttggaggtcggctcggagatagtcttcttctaaaatctccaagtaaatcgaagcagactgactaagcatgtcttggttgatctcggtgacataagtaaagtctacctggtcttcttggtctttcaggtctggcaagtccccttccaagttcagtttatccagctggctattaaagtccatctccctgtaaaagggaaccagcttttccaagtccttgccggaataggccaaatcagccaggtctacttcgatgggggagtgaacatcaatggtggccagctttttactcaagtaggctgtctctttttcgtctattaggtagtctttccgcttggacttgttcatctcgtcgatccggtcgtaaagttcttcaaccgaatggtatttttttagtaatttaatggctgttttttccccaatccgggtgacacctgggatattatctgagctgtcaccagccaagcccttcatgtcaataatttgtttgggttcaattcccaattcctcttgtatgcgtccagcggtatagtccttaacgtccgataccccttttttggtaagggcgatccggaccttgtcagtagctagttgcatcaagtcccggtcccctgtcaagaccactacttccaggtcatcctggtcctcaagccgagtcgtcagggtcccaataatatcatcagcttcgtattggtccagttggtaggtctgaatcccaaaggcctggaccaattcttttaagtaaggaacctgctcggaaaactcactgggcatgccttcccgaccacccttgtagtcttcataatagtcgtgtctgaaggtggtcttgccggcatcgaaggcgactaggacatggctggggtcttctttttccataatactctctagcatattgtggaagccaaaaatagcgttagtatggaggccgttgcggtttttcatggattccaactggccgtgtaagccataaaaggctctaaaggcaacactgtagccatcgatcaacaggactttctttttagacatggtctctaatctccttcatctgcctagttttatgactaagcaattcttgcttttgcttcagaatttggtcttgattattaccaatagtttatcaaataagtaaggggaataaaacagattaaaccagcaagccaagcaagcaaaaaggcatgctaaacccctctgggaggtctgacatgccttttgcactttatttatttttagcttagacctgggagtggtaggttgagctcaacaagctttcataggctttttcaaacttgctgatgtctcctgctcccatgaaaataatcacttgcccatgttggtcaagcagaggagacacatcgtcttcctcaatcacctggtcggccttgctggttttagccaaaagatcttggatggaaatatcgcctgacttttctctagctgaattaaagatatcacacaagtaaacctggtctgccaagtccaaggcctgggcaaattcatctaggagggcgactgtccgggtaaaggtgtggggctggaagaccgtcacaatgtccttgtccgggtatttttgccgggccgcatcaatcgttgcccttatttcagcagggtggtgagcatagtcatcgataatagtagtgtccccgaccaccttctcggtaaaccggcgtttcaccccagcaaaattagccaatctttgggcaaccaaatcttggtctaacccttcgtagtaagctactgctataaccgccaaggcattttgaatattgtggttgccataggttgggatggtgaagtgtttgtaaaattctcccttaatataaaggtcgaaggcagacccttcacgacttcggtcgatgtttttagccacaaagtcattgtcttcatttagaccgtagtaaatgaccggcacctgggctttgacctgccgaagacgttggtcgtccccgcaggcaaagaggtattttttgacctggtggctgaattcatcaaaggccacttggacatcttcaatagacttgtaatagtccgggtggtcaaagtcaatattggtcataaccgcatagtccggtcggtaggccaaaaagtgccgcttgtattcgcaggcttccaagacaaaatacttggcacctttttccccatggccggtcccatctccaattaagtaggaggtgctatcaataccggagaaaacatgggccatcaaaccagttgtggaggtcttaccgtgagacccggtaatagcgatggaagtaaagtgttcgataaggtcaccgataaaatcatggtagcggatgatttctaaaccgagctctcgacctcggaccagctcgggatggttgtctccaaaggcattgcctgctatcagggtcatacctggtttgatgttatcagggtcaaattctaaaatgtttatatttttttcttctaagcttttttgggtaaagaaatactttttgacatcagatccttggacatttaagcccttgtcaaacaagatagtggcaagtgaactcatgccagatcctttaatgccaacaaagtgatagatggtgtcttggtccataccctacctccttcttgtttatctttacgacaactttacaagtatataacatttatgttaaaaatgctagtctaagagtcagctttttggtctgtctgccattttttaaggatattggcatttaaacagtcttcggtcaggagaaagtcatggtcttgttttaacatcaagtcttttaaggccttgtaattccactcaatttcttcctgaacctcttgcttatcgtagcccatccgctctttctgttccttgctatagccaaaaactggggaaggaacttcagtcaccttaaaccggggccggtatttttgcgactgcttgtgttcgtaaagctggttgaacttagacttacccttgaggattttctcggcttcattttcctggctagggtccttgtggaggtcacgagctaggtccttgtctctctggttaatattggcaaagttcagaccttcttttgggtcttttttgcgaccagacttaaaaaagccggtgtcttgactaggtctaggttctggactttctacttgctttttctttcgatggttgaaggaggggccgtcgtaattcattttgtcatccccttttaaaattcaaagctttctccagtcggtttgtcatcagctaagactagaatgccttgcttttggtttgatttaatattcaattctcgggctgagcaaatcatcccaaaactgtcaaccccgcgtaacttgcccggccaaatcacacttccatccggcatcatagcccctggtttggctacaacaaccttttggccttgggcaatattgctagctccacagacaatttgcaggctttggccctggtccacttctacttgggtgatatggaggtggtcggaatcttcatggtccttgcattctttaacgtaaccaacaacaaatttagggtccaggtctgcctggagggtctggtcaaaaccagcttctttgatcagttggttcaattggtctacctggtcttggcttaagctaactgggccgtcttcgtccaagtttaagtggttggaaatattaaagaagttgtaggctaccaatttgccacttttttggttatagatagcggccaggtcattggaccgttcatagctttggtcactagccttggattcttccagcatgaccattaagacatcttttaaactcttattgttataggctgttactagcatgcaaatctcctttatttgttcattagggtgttcaaggtagttcggtcaaagttcttaatcagttggacgagcaggtctttggctgcatagtagtcgtcaatgtggaagagggactggtgggtgtgagggtagcggacaggaacgcctaagacaccagacgggatcccgtcgttaagctggtgggcagctaccgcatctgttccccctttagagacaaagtactggtagggaatgtcatgactttcggcagtgtctaggataaaatcttttatctcttttggcatgatgtagcctggatcttggatacggattaatactccgtccccaagccggccattagcatccgcttgaccactggtatcctcggctggagaagcatcgacagcaaaaaagcagtccggcttgaatttccggaccgaaccctttgtccctcttaagccaacttcttcctgaacattggccccggcgatcaaggtattagctaaggtttggtcgcccacttcctctagggcatcgattatggctaaaacaccaaagcggttatcccatgccttgccaagaatggtcttgccattagccaaggggatagtttggacatctggaacgatagcttggccgggccggacaccgtaactttccgcctcttccttggaagtaaagcccccatcaaataagatatcttctaagttcaaactcgctgaaccagacttattttttaacaggtggggtggaatggaagcggatacgattggtaggtcgccctggtcagtctgcagactaaagcgctgggaagagaccacattgggattccagccaccaaggggtcggacttgtaagaggccgtttgcttggatcttagccaagataaagcccacttcgtccatgtgggccgctagcatgagccggggagcctggtcttcctgactcgccttaatgccgaaaaccccgcctaagccgtccatctcaattctatcgactttatccttcagttcgtctttcaggtaatctctcatctgatactcaaagccagcagtggcttggatttcagttatttttttaatgcggttaaataatttttcgtccataacaaatggttagtaaataaccctacctcctcagtcagtcattgatttaattatacacgaaagcgaaggcaaaggaaaagcaagcccatttgtacttgctttagcctgtaaaagccactagaatggttatagatatattttatcaaggatgtgacccaattaaatgaatgaaaaaaaccagtccttattctgggtagttgtggccagtattttaagcctaggcctcttcttattcctctttttcctctaccaagaccgcaaaatgatgtcaagttcggctgtcttgaaaaatgccaaaaaatcttttaaaaaagatgggccaatcgaaggttcctggatccaaatgaccccatctacttacaaagttgatactgaagaaagtccagtctactatgggggtatcacccgcaaggtagaccaaaacatccagcaatatgaatttatagccgatgcctacactggccaaattattaccacctatcctatagcttcttaaaataaaccagctgacttacgatcaaggtcagctggttttgctttatcctaactaaaaggtcaaaccttctgattacataagaagtgggtcttaagccttcaaacttcctattctttgggaaagtgggcgtggacccggtagatgggttggcctttagcggaaaacttttcttcgtattcagtcataatattgcccacaaagtcagactggtgcaagtctaagtagacttggtctaagaccatgccatagtgggaaaaactgaccagggaatattcaaaaaggccccggttgtctgttttaaaatggaggctacctgattcatctaagacctggtcataaatagctagaaagctcttataggtcagccggcgtttttcgtgccggttttttggccaaggatcagagaaagtcaggtaaatccggtcaacttctccctggtcaaaaaaatgggtcaggtcctggccgttttcattcaaaaattttaaattgggcaagtccaagtcaacctgcttttctaaagccgaaactatcacgctggtttgttgttcaatcccaatatagttgatgtctgggttttgcttggccgcttctacaataaactgtcccttgcccatacccagttcaatatggatggggccggcttggtcaaaaacgtcctgccacttccctttcagagccatagggttaggcaggacatagtctgtgtgttctttgatatagtcagctgcccaagctttgtgtctgagtctcatcataagtcctcccttccattagaaaagggcttgtgtcatccataagccctttgactttgtatttaacttagtttccctctggccctattgttaacatttgggccaaggatttgattccatggttcatggctggcatccgccgtttttcataaaagactttgatatctaagagggctgctatgacctggtaccagtagattctccttttaaaggacgaactaagcttggcttggtaatgattaagccagtcctcccagtctaaatactgccaatagcgggcaccatactggcctaagtcataggccgggtcagcgaggatgaccgagtcccaatcaactaggtagaggtcatcaaaatccgacaaaagccaatttttatgggaggcatccccgtggcaaaccactaagtcctctttatctagctggctacttgcctgggactgtaagtaggctaaaccctcttgaatagttggatgagactctaagtcactggctagcccctgtaaaaattggtcaagcaagtcacccggcttcaagtaactgccatcaacttgttgaagcatcttcttcaaggttttggactggtggacccggtgtaatttatgggggacctcagccaatttcatttcctctttggtcaaggtccgacccttgcaccattcttgggcggttaggacatcgccattgcccatccgtcgggtccataccaacttaggagctatcccttccatggacagggctgccagaaagggtgaggtattcttcttaaagaataacttctgctcatccttggttcccatataagcctttcctgtttcgccttttaaggggtgtaaggtccaccccatttctctttcaatcgccattttaacccaaccccttttttctcatcacaaaaagcgtaaccctattttatcgataggaaggcataccgtcaaccgatgaagtgttcgcttgtctactcatattttcttttcaagtaaacttggataaaggcccaagccaaggcagaagtcaagacaaggatggccaaagcctggctgatagaagtgaaaagccccaacaaagtaaagatgacaaccacaaagacagctagcttggttaagaatttgcgcaaggcagtggctaggtctgcttgggaaagggggaggagttttaagtaagctgtctggtttaagtcgtctaggatgggggtgagttggtagagggccatgaggataaaaaggccagcaaaaatcaaggcaaaggccatattactagacaaaacaatgagaagaccgccaactaaaatcaaacgaataagaaggttgcggtagccaggttggcggacaaagatacgggccagtaagaaggaggcctggtccccctctttcccttcaaaaaaggcaaccaagcgaggcaagtggtaccgtttttttccgtcatcttggacttggggcacatcggtaacgaggttaaaaaagcggtagatagtctgaatccgcttgttttcttcccggatgacctgctcgattaagataaagtcaggccccttgacctggttgactaaaaagtaaaaaaggatagcaacaattaaactggcaaggctaaccaggaaggggttaaaaataaagttggtcagaataaggacaaagcttaagacggctaaagccccggtcaaccgggccaggtagagtcttctgactgtcactttcttctggaagcttaagtaggtccagtccagctggaggacgaggacctggaggccaatcacagccagttcaggcacttggtagcccgttagccctgcaattaaaggtcccaataaaaagatagccagaattaaaagcaggactttaaagaggagggactgccaggcataggcccgcagactgggcttcaattcttcaattctgggcaaaaagaagaggcggtcagcattttgcatatagctagcaatccggccccataccaaaaggaaagttaagataagggcggtcaagacctgtcccactaataaaccaggcttgaggctatctaagacttcccggtataaaaagcctcctgcccccaccaaaaataagagaaggatggtaaactggtcattaaaaagaaggcggaggtatttggcgacttggctgtgaaaattactccgtcgtttgtctaagaggtctttaagcaccgctatcaagccccccttctgggtggtaagtttgcgccatcattttttcaaagaccaagtcaagctggttaatgtccaagtcaaagagctgggcaatctcttgtaaagttccttgagctcttaccttaccctcttctaaaatcagcattcgatcacaaacatttttgacactggacaagacatgggtcgacattaaaatgccggctcccctcgccttggcttcttgcatcaatttgacaaagtcccgcatagccaaggggtcgagaccgataaagggttcatcaataatcatcagcttagcccgggtgataaaggcacaaataatcattactttttgcttcatccccttggaaaaatccacgggaaaccaatcaagctggcagttgagccggaacaagtctaacaggggctgggcccggttcatggcctcagctttcggaatatcataggaaagggcagtcaactcaatatggtccctcagggttaagtcgtcataaatcatgggtgtttccggtatataagcgatctgtttttgataggccatcctttggtccgataacttttgcccatccaggctaatttcacccttaaaaggcttcatcaagcccatgatatggcgaatggttgtacttttgccggccccatttaagccagccatgcagacaatttccccgtcatggatggtaaaatttaaatccgatatgatttctttgtggtaatagccaccacttaagttggtcactttcaatgtcattgatatgcatcctttatttactgtaatttgatttgtcgaagtccgaccctttataagttttacccctaagcggtttctgtccatttaggtctcatcccaggccattatatgttaaaatggggacaagaatgatggaaagagggatattatgtctaattgtttattttgcgatatcatcgaagggaatgttccctcaagaaaggtctatgaagacgacaaggtctatgcctttatggacatctcccaaactactcctggccacacccttgtcgttcccaaagagcatgtaagaaacctctttgaaatgtctagtgaaacggccgctgacttattcagccgggtgccaaagatcacccaagcgatcaaggccagtgatgacaagataaaaggggctaatattttggtcaacaatgaggaagtagcctaccaatccgtcttccacagccacgtccacattataccaagatattcaagccaagacgactttgcccttaaatttaccgataattccgaaaaatacagcgatgaccaactggatgccatccaagcaagagtccagggtcagttgcaagaaggagggcaataagatgagcttcttattgggaaccgccgccgggctagttttgggaggcttttacggcctccgtcacaccccccggtctggcaaggacaaccgtcagtgtatccaggactatgtggacggggtaaaaggccagtccaaagtcgtccaagatgactttaacaagttcaaccaagccgtcaaccaagtcaaaagtgagattgacaaggtccaaggtccaatcaaccaagaattccaagaccttgcccaccaataccaattggaattagagcccagattgggtcggatccaaacccgggctaacaagttaaaggagaccttggataatttaaatgtctaggaatcgtgagtctaccaagcctagtttcgctaggcttttttgtttgccttggaataattcatgctaagaaaaaggccccgtccagcaagttgatcttagcctggacggagtcggaatcttggcttaggactaaaacctagccttcattgttgtcttggtcgtctgcttcattttctgcttggtcgtcattttcctggtcgccatcgtcttggtcgctatcatcttgaccatcgtcatcctggtcatcgtcttggccatcatcaccattgtcttggtcatcttcctggtcttgaccttcttcttggtcctcgtcttctccatcactttcctcttggtcagggtcttcttcttccacctgaggttctgataggaatggggccatggcattttgcaagtcagaatcagctatattaacattagcttcttggaccagttcagtcataatgctgttgaccacttgtgggtttcttagcaattcatcttcgacataattgttggtcgcttcttctttggcatcttcaaagtcttctttttcccctttttctaggagtttgatgacatggtagccaaaggatgattcaaccggctcctcagtaatttccccttcatccaaggacatagcagcctcttcaacctcaggaacaaagcgaccggtttcaagttcatactccccaccgttagaagcggaaccagggtcttgtgaccgttcttcagctaactcggcaaagtctgccccatcattgagttcttcgatgatgtctttagcttcctgctcttcatcaactaagatgtgggccatccgggttccttctggcacttgggaatcgtagtgttctctgacatcttcttcagaaaagtctgcccggtcggctacagctgctcggatcatcaagttcattttaatcgattgttccaagtcagccatatcagttggcgaattagccaaggtctcttctaaggcttcccggcccccttgagcttccgccacatcgtctatttctgcctggacttcttcatccgatacttggtcaccgtaagcttgctccaaaatatcttctagaagcatttgctgcaagacgatttccccgtaggtacccccactaggtgaggggttggttttgagtctttcgtaaaattcatcttggcggattcggccagcagtagttgaagcaatttcttggttttggccacaagcccctaaaaagaggagggacccaatagctaagccagtcatggcttttttaaatttcattatgataacacttcctaatcatgattctaatttccaatacttcaataatatagcatatttcaggccacttttaaaaccatgtattaaattatcaatcttttttcatgacttaggcaaattcaagaatccttgctctggcttgacccctcttctagtcctggatggtagaaagaccggttgtccatagcccaaattttaggagtaaactgacctgggtcggtcttgtccaattcagaactgaccatatttatcttggcatcaatcaagtcaatttggtggaggacttccgcctctaagagttggggccggacgggagagccaaattccaattgaccatggtgggagaggaccatatgcttcaagaggacgacttcctctaaagactcatcaattttcaaatcttgacaggcctgggcgatttggtcattgactaagacgatatgacccattaacttcccttcaaaggtatattgggtggcagtcggcccagaaagttccatggtcttacccaggtcgtgaaggatcaagcccccataaaggagggacttgttaaggtttgggtagatttcagctaaggcctgggcgatttttagcatggtgaccgtgtggtaggctaaaccggcataaaaggcatggtggttagacttggctgctgggtattcaaagaaagatttgtggtgcttgtttaaaatatagcggacaatccggttaatgctagggttggtaatggagagaatggcctggtttaagtcttccaccatttcctcttttttcataggagcccttttaacaaagagttctggccggttgggttcccctgactttgctaagcggatagaggagatgttaatctggggaatccccttgtactccgtccgcttaccttctaagtaaacaacccgaccttcttgaaaggcttggacttggtcaggcctggcatcccataaattcgccgaaatttctccactagtatcttggaagacaaaggcaatatagggcttgccatttctggcttctttttctgtagcactcttaattaagaggtaaagttcgagcttgtcattcacttggtagtcataaatcttggccatttttgtcacttcctttaaagcttggataaattggtcacttggtctggcttaaaccggcttaaaacactggggtcaaatgtaaagaggataacctggttgtcttgactgatttcttccaatatatcataaataactttcttacggtcagggtctaagttaacaaaggagtcgtccacaataataggaaattgaagcttgcttgactgaaattggatgacggccaagcgaagggccgcatagaggggctcagcagtcccccgtgataggtccttgactccaaagatttgcccgtcttgcctttggacctgaattttatcggccttaaattggatagattggtagttgcccaggctcagccggttaaaatagtcactagcctggtctaagatggtaggcacttggtctctcactcccgccttgatagtctcttggattaggtcagaggctaacttgtaggtcaaccattcttgggctaggtcttggacataggctttttggttttccaaaatctgggctcgttcttcatattccccgcccatttcaatcttttgggcctggagtttaaggctggacttctcttcaatcaaatggtccttcttgctagcttgctccttcaatctagcctgaatttcctggtctttccggtttaagctttggtagttaactttacctaagtcggtctggtcaccagtttttttattttcttggaaaaaggcctcaagcctatccctctcttctgcctggttttgggcttggcgggaccaggcaatttgctttttaaagcgagcaatggaggtctcatggtacttggccatgacctggttcattttgcggtcaagctggtcagcctcctggtttaagtcccccaattcttggctaagccggttaagctcttgctggtcttgtcggtcttcttttaaggcctggtcgaccagggtcttaaactggtttaaagccgctatcttataatgggggtcttggtaagtcgcaaaatcatccgtctgctggtcaatccagtccgcctgtctttggactttttggccgaggtcagtcctctctgcctggaggtccaagatagtatgtgcctggtcgacatactggttaaaaaagttaacccggctgataaggtctctcaagtttaggtcctggcttaaatttttggcccgcaaaaagtcctggtaacggtcctccaattgcttacgcctaccttcttcttttgcttttaggtcttggagatggtctatgtcttcggcctggtccaatcggccttggcctagggaaacctggcttgcctggttctctccccttgcctggcttaaaaagtagactcctccagccgccaacaaggctaagatcactgacagggcaaaggaaaagtcaaacaagaaggccaggagaaaggctacgataaaagcaaggcccggccaaagccaacctggcgagtcttcgtcttgactgttttcttcctgtaaaacttgtctgatccgggcctgggtttctgccttgtaaatagcgtcatccaagtcggccagcttggactgggtctgccgccactcctctaaccaagacgatagcttactcctatcctcctggtcaattttttgcacttcttggtctggatctaggtccaagtcttggcccaggtcttggtggtttcgtttcaagttagataagtcttggtcaagttcctgacaggcctgggacaagtcaactaacctggaagtttggtcaaacaacttgtcataggacgcccgattgcggtagtaatcttctaagctcacagcaccggcgtccaagccttcttggctagcctgtaaatcttccaactctttattcaaatggtcaatttgattgtttttttcttgagactgactcaaccagtcttcaaaggctagccagtcatcctctttaatccggtctcctgactggtcaagggcctggttcaaaaactggagacggtcaattttcgaccaattttttaagtaaaactgaacttggtccctatcctgtctttcttggtctaatctttgcttgactaggtcgatttgttgatcgatagctttcagttcttcaagcaagctgaggtaacttgcattatgtctgtcagcttcatgaaagttctcttcagcctctttcaggtcagccaaggcctggttaagcaggggcatccggccagacggtttgaaaatttcttgagcctttttgtcaaaatctgccgccagttccaaataattagctgcccccgacacgcttaagttcagaaaattttcttctaattggctgggcttgacttggttgattttttccaggtcatccaggctgaataagtaaaattgccgaaagacttggaggttgatattggacaagagactctgaaaaaagttttcatctagaatagtctggtcgggtaaaataatccgaccttggcctgacacttttttatccggcaggcgttcaaccgtcacatcacccaatttggaatcaacgacctccaagcttcccccatactggctactagtcttgggttcatagcggttgtcgttttgcacccgggtggggaagccaaataaaatagcctggataaaggcaaccaaggtagacttacccgcttcattgccaccgtaaaagacatccaagtccccctggaggtcaaaagcttggtctaaccacttgccaaagcccagaatccgtatcgctttaattcgcatgactgcctccttatcctttatcctcttggtccaataattgcttggcttggtcgactaggtcagcctggcgggagctcgactccaagtctttgaggtaagattcatctatcttttgcttaagtatgtttaggtagccgtcaaggccggtcctcttgagagaggtcacggcttcttgccaggccctaggataaaggctagccaacttgtcttgtttagcctgccagataattttccggtccttgagccaaaggtcttggtccaagacaagttcatttaacttgtcggcactgagctggtcggctaggtcttttcctgcttggtcatggaccaagaaattgacccggataatttgataagtctttttccctgccaagcggtctagcaaggcctggtggacagagttaatcgtgtcctggtccgttactggcaagtcccattcatcccactctaaactggcagttgggaaaaagctgacctggtggttgggtccttgcaaagtaactaaaagggcgcccttctgccctttctcattgatatgacggccttgggtattgcctggataataagccggcaggtcggggaaaacttggtggaagaagtggatatgacccaaggctaggtagtggtagtggagtctggctatatcttctttctggaaaggggcatagtcctgggactggctggccaagtccccgtggtaaagacccaagtggtagtccacctgcttgtccctggctggaaagctggccagcatgttttttgcgatatgttgctggtggtagctaaagcccgtaatggcaactttttccccagctttgctttctaggtaatgggttgtcacttggtcggggaaaatagtgacattgtcaggaaagtctaggtaaaagcgttggtctgcaacataatcatggttcccaaagccgataaaaaccgggatgcccgcctcctgcaagcgggtaaactggtctttcaagaagacctgggcgtagatactccggctggctaggtcaaataggtcgccagcaattaggacaaagtctacctcctggtctaaggcctggtcgactactcgagcaaaagcatcaaaggtcgaagccttgacttggtttaaaaggtcccggtccatatgggctaaacccttaaagggactatttaaatgtaggtctgctgtatgtataaattttaccatagaacctccaataatgggaacatatattcttgtttttggtaagaaaagagccctgagctagggcccttgttagtatttgattattgttcttcctggccagttttgggttggtgtttttggtaaagctcttgaatcggtcgcaaggcaatttggttgatctcatcaataacctggcttaccttttgctcggcttgaatgagctgggctagggtcttgttttcccctaccttagccgataattcttgggcttgtttggcatcttcttcggtgatttcttggcctgtcatttgtttttgctggatgccttgttggacctgtctgaagtcatcaaagagcttactagctatttcatctttttcgactgcttcaaaagcttggaccaggtctttgaattcgtccgtttgacgtaagtcactttctaactggttggctgcgtcgtaaatattaacgggcatttctcttaccactccttcgtcatgataccctatgagtataccagaaatgacttagtggctcaaatgtaagcggaaatataggataagaagctaaatttaaccaaccactactggcgacaactttaattgctttcactagccagttcttgagcctccgaaatccattcttggactttttcctggttttcacttatccaattttcagctgctagctctggatcatcggtttctgccaattccaaaacgactgcttccaggtcatccatttcccactcgaaattatccaaaacagaaaaggcaattggatgatcatcctcaaaaccttgtcgaacatgagtatagatcgactcatcatcaccgtaaacattttcaggatcatccaggtatttcaagtcaaattcttggaacatccaatgaggattccagcctgttaccacaatttcttcttggttttcatatctggttcttaattctgttgtcattgcgcctgtagaagcattctgtaattcccagtctgccaggttatcatatacttccatagcttcttcggaggaatccattatcccagcaccaggctcaatacctgtaatcgttttatcggcctggtcgtccaagtcttcaatggagttaaggtcttccatataggtagggactgctagaccaattttagccccgtgagtatggggaccgagattttcaatctgatcgccatattcctcttcttgagccccatgtgtaataggaagccaggcagtaactgaggcatcagtttccccctcagctagggcctgccacatgacagaaacatctacactagtcaaagtgacatcataaccaatttcttctaatacttgggcaataacatttgttgaagctaaagattcttcccaatcattatgggcaagttctatttggtctccgtccacaagtttttcgtcaacagctttatcgttgccctcgcaagccagtaaaaaactagaaactagggctaagctgactgttaattttagattcttgacaaaatgtgccataaattcagctcctttaaaatacgtcttctattataaaggaaatgctgtatctagacaatttttgcttgttagctaggggatattttgaacaatattaataatctaggcccaaaatgacacccccttacaagtcgcaacttgtaagggggtatctatccgtctgcttcattcaaacggattttattcagttatgggttcttctgccaagagttcaatttggtgaagaccataaacatccgggtcttggccaggaattgcgtcgtgggcatagacagatacccggtcattaaccaattgaagttctgtacgccagaaggtagggagggtcgggatctcgtctatgaagaattcctgccagtcgtagaagacttgctggcggtattcgtcatcaaaggcttcttcggagacaaaatcttgcaagtactcattgttttcctcagactcatagcgggccaagttaaatggttcatttggaccgtacaagccaattggtgttgggtcagaccctaccccaaagcctaattcaaatacgtcaatatctgggtcatctgcttgaacccggtcgatgtgggcattattctcgtggagtcggccatctagtaaggaaacattaaggccaacttcttcccaggcctggagatagtattgggcaaccgtttctgcgacctcagaacctgctcgggaagcataggtgatttctagcggttcaccgtcaggatcttcccggtagccgtctccgtctacatcttcgtagccagcttcgtctagcaattggttagcccggtcagggtcataagggtaaccttccaagtcatctcggtggaagtcagtaaagttgggaataatgtgggtggttgcccgctggcggagaccagaatagaaggattcgctaacctggtcaatgtccaaggcgtaagccatagcctggcgtaagtttttatcagccattttagcatctggatcgacttgaaccttaccggcttcttgatcccactcacctaatttaaagccgataaagtcataactttgaccggtgtagccgagggtagtgtaacccgggataccgtcttggaaggtatcgtattgatcagtaggaactgtgtcaacccagtcaaattcacccgcacgaagggcttcaatagcaccggatgatggaacacgttccacagtaatgccgtctagctttggagcccctaaataatagtcttcaaaggcagaaaattctaccgattcacccggaacaacattatcgaccttgaaaggtccaaagccaactggattttctcggacattcgggtgagattccagttcttcagctgggatatcgcctaagtggtggcgaggagcagcataagaccaaactcccccacctgcttgggtcatggtagggtcaaattccttgtaatggatagtcacagacatttcatcgtctgacaactctagacctgaaatggagtcagcttcaccatttttaaactcttccatcccttcaacattagcgatgtcttcaccgtaacggataccggtgtagttagggtcccctagaatttcgtgggcaaagaccacatcatcagctgtcacctgctcgccatcatgccagtacacatcatcgcgaacagtaatggtgacacttgaattttcttcgtcaaattcaatatcggcagctgtaccccattcttcgcccccaactagttcaaagttctcatcttgggtcaataattcgcccaaggtgaagccattcaaggttgagtccgtactcacttcgtatagttgccagtcaaagataccagtccaagcagagtcagctacaatcccaacttgagccaccccaccatcaatgggctcgccttcgttttcgaccgtagactcaaagtcatcaacggaaacagcactggactcttcaccattgctttcttcgttagtttcttccgtttgttcacctgaatcagcaggtgctccgccttcttcctggccactttcgccgccacaagctgctagggtcaaggccactagggttgagctggcgagtagcgcgtattttctcttcaaatgcatattcttcccccctgtttctttttactagcggccctccctggttagaccagaattagccgactatgatgttggtccccagtctaagacttagggttggaatagcaaatagttaaccccttttcaaatatgaccaccatccccttttagcacaaataggactaagtatttaatgagtaactattgtattcctttaactttaataaatattgtaagtgaaggaatgaggaaaatcaaggcttaaatcagatcttttttaattttatttaataaatactgtggttatcagcttttcgttcacttcatttttttacaaaaaaactgtcaggcccaaatatgggcctgacagggcagttataatcgcgatcaattgagtcaattattcagtcaagggttcttcagctaggagttcaatctggtggaggccgtaagtatcagggtctacgccaggaagttcttcgtgggcataagctgacacccggttgttgaccaattgcaactcagtccgccagaaagtaggtaacagtggaacctcgtccatgaagaattcttgccagtcatagaagacttgtttgcggtagtcatcatcgaaggcttcatctgatacgaactcttgcaagtactcattattttcttccgtttcataacgagcatagttgaagggttggttagggccaaatgcttcaatcggagtcgggtcagtcccaacgccaaagccggcttcaaaaacgtcaatagcgggatcgtcttcttggattcggtcatagaaggcattgacttcatggagtcggccttccaagagagaaacatttaagccgatttcttcccaagcttggataaagtattgagcaatgggctccgccacatctgaattagcccgggcagcgtaggtaatttccaagggttggccatctgggtcttcccggaaaccatccccatcaatatcttcgtacccagcttcatctaataattgcttagcccggtctgggtcataagggtagccttccaagtcatcccggtggaagtcagtaaagttgggcacgatgtgagaagttgcccggtaacggaggccggaatagaaggattggccgacctggtcaatgtccaaagcatagcccatagcctggcgtaagtttttatcagccattttggcatcggggttgtattggaccttgttattttcattgtcccactctcccattttgaaaccgagaaattcgtagttctgacctgggtaacctaagatcgtataaccagggataccttcttggaaggtatcaaactggtcagtcggtacagagtggacccagtcaaactcaccagcccgcaaggcctcaatggctccagaagttggaactcgctcaacgacaacgccatcaattttaggcgccccatcgtagaagtcttcaaaggccgaaaattcaactgactcacccggtacaacattatcaactttaaaaggtccaaagccaatcggattttcccggacattggggtgggattccaagtcttcagctgggatatcgcccaagtagtgtcgtggagcggcgtaagaccaaactcccccacctgcttgggtcatggttggatcaaattctttgtagtggatggtcacagacatttcgtcatcagacaagtctaagccagaaatagtgtcagcttggccatctttaaactcttccattccttcaatatttttaaagtcgtccccataccggatcccggtatagtctggatcgccaacaatttcatgggcaaagaccacatcatcagctgtcacctgctcgccgtcatgccaatagacatcatcccgcaccgtgatggtgacacttgaattttcctggtcaaaatcaatatcggcagccgttccccattcttcacccccaactaattcaaagttttcatccactgtcagcaagcttcctagggtatagctattcaaggttgagtccgtgtttatttcgtataattgccagtcaaagataccagtccatgctgtatccgccactaaacctacctgggctaccccaccatcaatggggtcaccttcgttttggacagtggattcaaagtcatcactggaaacagtactggcctcttcaacatttgtttcttctgtttggtcacctgaaccagctggtgtcccggcattattttgaccgctttcgcccccacaggctgctaaagtcaaggctaggagtgttgaactagccaataaggcgtattttttatttaaaagcaaaataattccccctaaacgtctcttgcctgtcccaaaaaatttgggacaagcgtcatgtgttataaaaaagaaaacaggaatataaacaagagcctgtcttacaattaagtacccttctcctttcaaaacaaaataataagtgtttaataagctctcgcttctattcctttaattttatagtccattttaattaaatcatgtgataaaatcaagttttaccattttcctctaaaaaagacctgtaaaccgttcataaactgtaaaaacctcttgcctgttcctcataaaggctaggcaagaggtttaatttttaacattgtgctaacaaatgcttattcagaaatgggctcttcagctaggagttcaatttcatggagtccataggtgtcttggtcaacttgtggaacagaactgtgggcgtaggcagagacccggtcgttaacgatctctagctgtgtaaaccagaaggtcggtagggtcggaatttcatccataaagaattcttgccagtcatggaaaagttgctggcggtagtcgtcatcaaaggcttcatctgcctcaaaggcttggaggtattcattgttttcatccgtttcatagcgagtgaagttaatgggttcgtttggcccgtagatgacagatggggttgggtcagatagggcaccaaaacctgcttcaaagacatcaatttcagggtcgtccccttggattcggtcatagtgggagttagattcgtggagtcggccttcaagcaaggaaacatttaagcccacttccgcccaagcttggaggtagtattgggaaattggttcagcagtgtcacccccggtcatagcagcataggtaatttcaagaggctggccgtctggatcttcccggaagccgtcgccatctacatcttcataaccagcttcatccaagagttggttggccttgtctggatcataagggtagccttccaagtcatctctatagaaacttgcaaagttagaaggaatatgggaagtggctcgttgacttaaaccgttggagaaggtaatagccacctggtccaagtcaagggcataagccatggcttggcggaggtttttgtcagccattttggcatccggattcattttaaccttgccttcgtctgcatcccactcaccgagtttaaagccgaggaagtcatagccacggtcaggatagcctaggatggtgtagcctggaagaccctcttcgataatatcaaactggtctgtcggtacagagtctacccagtcaaattcacctgcccgcaaggcttcaatggctccagccggttgcaaacgttccagggtaatcccatctagcttgggttcacctaagtggtagtcttcgtaagcagagtattcaacagactctcccggaacaacattatcgaccttaaagggaccaaagccaatggggttttcacggacattggggtgggacactaattcgtcagctgggatgtcttctaagtagtgccgtggtgcagcatatgcccaaacgccccggcccgcttgtttcatggatgggacaacttgttggtagtggatggtgacggtcatttcatcatcagacaattctaaaccagaaatggaatcagcttctcctgctttatattcttccattccttgaacattggtaaagttatccccatatcggattccagtgtagtctgggtttcccacaatttcatgggcaaagacaatgtcgtcagcagttacctgttccccgtcatgccagtaaacgtcatcatggactgtgatagtgacggtgtcgttatcctcatcgaattcgatatcagccgcagccccgttttccttgccacccaccagttcatagttctcgttcatggccaaaaggtcacctagggtatagttcatcagagaagcatcagcttcattttcatagtgttgccagtcaaaaatcccggtccaagccgtgtcagacaagacaccaacttgggcaatcccaccatcgatggcttctccttcattttgaaccgtctcatcaaaatcttcaggcgaccgttcttgtgtggcctggtcttctgttgtctcttggctgctttctccttcctggcctggatcaaccggctcgccttcgccgccacaagccgctagggtgagacttagggcagcagaactagctaagatggcatatttctttttaagagacatgatttttcctcctatgtttttcaatctgtcctatttgaccttgtataaaatagggtcatttacaaactcaatcaatacaggaccccactatctttggaatggaccaagtagtggctttttaggcctctctttactaatcatctggcaaaagtgaggtatttacttattatttgttagtattattgtaaatagaagcagttactttatcaagtttaaagtttatgtaaatgaaaaaatctgcttggaaataaatattgcccctggtcagtcattggcaagtcaaaatcgactcaaacaaaaaaccagctgtttttaccaacagctggctgtaatgaatgagttcttgttttacctttacaatagtcttgctaaggttagagggtccaatactatcgactcgttttttattgaccaaattcccgtagccactcgacaaggtccttgccaacttccttggcaccacgtttgaactggtcataaccttccgccaaaccttccttggtggattcgatagccgaatcgaccttctccttgagctcaggcgactggaggaagtctaagaagctaccaccatcgtcctcttgatcttcttcgttgatcttgtcaacattaaagtcggtttgattggtataaggcaggatgtgttccatttgatatttaaaggctacacccaccccttggttagcataattagacaggtagtgggtctcagagctttcatcaaagcccatccaggaggctaaaaccaggtctggtgtgtagcccacaatccattggtcggttgccccgggcccattttccctctgggttgtccctgtcttaccagccacctggtagccgtccggttcattgactgcggccgtccccgtatcaaagacatccagcaagagctggttcatctcatcgttaacctgctggttcaagacccggtgaggcttggactggctgttgtcaactaggacattgcctgttgcatccacaatttgggtgataaagtggggttcaatccgaaccccatcattagcaaaggtggagtaggcactggctagattaagcggagatatcccgtggctcatcccacctaaggcaatactgcctaggtgtctgtcttggtcatccacctgccaaccaaactctttaagcttggccatacccttgtcaattcctatctcatttaaaagccaaacggtaggggcatttaaactctgagaaagggcatagtggagaggtacctggccttggtaggtaccggacaggttggttggggtgtagtctgtttccccataagaggttaattcatcttgtaagagggaatcaggatggtagccattttcaagagctggggcataaacacctaatggtttaatgaccgatcctggctgccgtctcatctgggtggcccggttaaagccacgcaaggtgtagtcccctcgaccacctacaacagccatgactccacccgtttgggggtctaaggccactgaagcagcctgggcaggagtcccatcttgagcactggcaaagagactatcattacggtagcttgcatccaattcttgttgggtggcctggttcaggctagtgtaaatcgtgtaaccccggttcattaactcttcttcatccatcccgtatttgtagatggcttcactaatcacggcatcaaaataatagggatagcggtagtcgtcaatgggatcatagttgtctactaagtttaacccatactggctaatctcatcatactggtcttctgtcaagtaatcattgttaaccatgagttgtaagacggtattgcgccggtcgatagcccggtcataattgtcaataggattgtaggctgaaggccccttgagcatgccgaccaaggtagcagcttctgctacagtcaagtcactggccggtttgccgaaatatttctgcgacccatcttcaactccccagacaccatggcctaggtagacattgtttaagtacatggttaaaatctggtctttactataattcttctcgatttcgatagctaaaaataactcccgcaacttccgaatgatggtctggtctgcggacaggtaggcatttttagccagctgctgagtgatggtagacccacccccaacgacacgacctgtcgttaagtagcccaaactagcccggccgattccgatcaagtcaaaaccccggtgccggtaaaagcgcttgtcctccgttgcaataacggcctggactaaattatctgaaatttcttctatttcaacctggcttccctgctgagagttgaggctgccagcctcttggccactgacatctataatttgtgttttttcttctaaaccagcctccaaggtctccacattggcagttcgggataagtaatttaagtaaatcccaaagcccaaggcaatggttaaaacagccaggagggagaccttggttaggtgaaatttccgccaccaccttctaaaattctgccaaaaacggacaaggtagggggccaaccaattccaaaaagctttaacttggcgcttggcctgctccagaaaactattattttccatgaagacacctctttaacgtggtctaagtaactgatctaatcttaactatcatacactgaatcgaaccatccgacataggtccctagtatgatatcattttcacctatccagcgggccataatgagtgctatttaaagaaattttaaaatgaccagacactcttaagataggaaaacctccctggcaacttgagccaggaaggtcccttccaactttagcgaggcaggattaagaaataaaatcgtcgtataggtcttggtcatagaccacatccaattcacccataaattctttcagcccttcatgaccggtaaagatttttttaaaccggtagaggccgtccgacttgtcaaagccaaagaccccacccatatcatattcttcgcttcctcgggccaaggcatacttcatggcttcgtaattttcttgcaaagacccatttaaatttcgttttttgttggaagaagctgcatacatgtagaaggattttttattatagctcaccaagatacaagtagctaggaggtcatcttcgtggtaggtctggaacaatttagcatcctcaaagctgtgcattaaccggtcaaagtagtctttgggccggtgagtaatcccttgccgttctgccattatttgggtcaattcataaaagtcatccaaggcctggtcataaccctcatcatccacggtcagatagtgggtctggaggttatttttgtaagttttgcggatcttgcgccggttattgctggtgaaggccatcagcaagctttcttcatcatgaccccttaagtccgtcatcatgtggaagcgggggttggagaagacgtgttcatcttcttgctcagctgaccggaaagtatagcctaaatcgcggtatttttcgaccaggtcaggatcatgaagggtttccgggtccatccgcaacaaaaaggccttgtgcttgtccgctacgacttgggcttccttaattaagtcggtcaccaagtctgtatcatgaaagtcacaaaccggccctcttggcgcatataagaaggcatgttctccgtcatttttgactgatagaatggacaagcatgccttgatccggtcttggtcatcggtaaggtaaacatagtcaccgtcccagccttccttaacctggatccatttggtagactgcatcaggtggccctgggggtggttttggacaaagtcctcatattcctgaacgcggtcatggtcatttaagtctaataatggcactattaattcctccatacacgtaaataattttgtttagcttaggactgaaagtctttaacagcttgtttaaattgatcaataatagcttgaatttcttcatgactgtaggcataggccccactagccatggggtgcccccctccaccatggtctttagcaatttggttaatagctggtccttttgaccgtaaacggcaacggtaggacccgtctgtttgctcgacaaatatgccccaacacaagactcccgcaatgggacgaggaacattgacaatggcattagtgtctgcatcccttaaacctaattcctgtagtttggcttggtcgatcactactgctcccacaccatcttccaccttgacctggtctaagacatagccgtttagactagccacttgggggctgacttcgtagagttggttgaggaggtcagtatggtcaaagttagattccattaaacgacctgccacctgcatagtgtggggagtagtggctgggaattcaaagcgaccggtatcccctacaatccctccatataaaagtctggcagcattgtcaggcagggtcaagctatcctcaaaggcaaagtaaaagtctgcaatcatttctgaacaagacgaagcagaaggcttgacccaagccaagttaccataagggtcatccaaagggtggtggtcaattttgatgacttggttttggtcaaaatcaatattttccctgccatcgatccggtcaatattggctgtatcagtgacaatcactagggcgtcatcgtattcattagcctggactccagaaaagtctgctaaaaatttcaagtggtcgctcccagacccggctgtcaaaacagtcttatcggggaaatttgcccggataatttcagctaggccaacctgggacccgatggcatccgggtcaggccggacgtggcggtggataattatcttatcggcttttttgatacttttcaatatagcttgaagttgattttgctcatcttgagtcatggtatgctcctttaattcattatcaagcgcccggtcaagatagccttggcgactaggccttcttccgaaaaaacattgatttcagcacgggcgttcttacgagacttgtcaaaaatatccaccttaattaatatttcagcttctaaggggatatacttaaagtagtggagttggatttggtctaaggtgatattatggtttgtttccttgtagaccaccatggaagaaacatgggaaaggatctccgttaaaactccaaaagagatggatcccaaattatccgtcatctgtggactcacactgaccacaaactcattgttgcccacatcggagatcaagtctttgacctggtcggaaatggtgtcttttaaatggggctggtgggcctggctttgcatgactttcataatatcctggcgggagataatcccaatcaaggttaagtcatcagctactaccggaagtaggtcaaatccctcccaaatcatggcatgggccacgcttgcaacgctgtcgtactccttggccagcttggggtttttggtcatcaagctattaatagccatactatcatccttgccaatcacatcccgggccgtgacaatccctaccaagcggttatggtcgttgaccacaggtaggcgggagtggtcatgttgttgggctacaaacttataatcgtaaaccgttgaccctgactttaagtaatcggtgtcctccagttgggtgtagacattcttgatcaataagatttctttccggataacttggtcactgagagaccgattaatcatggaagcaaccgtaaaagtgtcataagaagtcgataatacaggcaaggccaattggttggccaaatcaatcaccgctttttcgggaataaagcccccagtaatcagaatagcggccccatttttaagggaaagttcctggacttcttggcggttcccgacgatcatcaaagagtctttagagatatagcggagcatggcttctttttccatcgctccaataaaaaaccggttcaaggatttattgaggccttcctgaccacccaacacttcgccgtcaatcacattaacgacttcctggtaagttaattttttcacctggtcccgacccgtctgcttggtccggatggtgccaactcgttcaatggcttgaaccaagcccttttcttcggcatctttgatggcccggtaggctgtcccgtccgaaacactcatttctttggcaatgttccgtacagataatttattgcctaccgggatcgtcttgatatagttaataatcttctcatgcttggttaccatctagtcttcctcccaaagttgtaaggggatattttcgtataaactggactgaatattggtaacggtgactccgaggaggcggacacctcggtcgacctggccaaattcagtccacaagtcataagccaggttgaagaggtcatctgctgattgaaggtattgcaggctggtcttacgtttggtgtgggtggtaaagtcctcgtaccgcaccttgatcaccagggtcttgccatggaggtggtggttggctagggcctgtgacactttttgcgacagggaccggagagactggataacctggtcttcatcgtaaatctcagtctggtaggtccgctccttgcccactgatttccgatcccggattgggttgaccgggctgtcgtcaatccccctgacttttcggtagagggaatgacccattttaccaaaaatctgggccaggtcataatccgatatttggtagaggtccgagccagaatagatacccaaatcatgcatcttttgtacggtcttctcgcctacgccaaaaaacttgtcaatgggtagggccatcaagaagtcatgggcggcatccgggtctaccacggtgaggccaccaggcttgcggtagtcggaagcaattttggcaatgaatttattataggaaacaccggctgatgcggtcagctgagtggcctggacgatctctgcttgaatcttttgcgcaatccgggtagcagacttcatgccatgcttatttttcgtcacatctaggaaggcttcatccagggaaatggcctggacgaggtcggtgtactggtggaagatttggtggatctggtccgacattgtccgatagaggtcaaagtgaggcgggacaaaagtcgcttgggggcacaattgataggccttagccgaggacatagcagagtggataccgtactggcgggcaatataattggctgtggtcactacccccctcccctctgtttcctgtgggtggcgggcaatgacaaccggcttatccttcaggtctggctgttccctaatttcaactgatgcataaaaggcatccatgtcaatatggatgattttccgagaggtatcccgtttcggttcttcaaaggttaggatgccatacttcatactactacacctctttgaaaactgtacctttattatacaacagattcccagattaaacacataataaaaaagacagttgcctgtcttttttagtttattctgtagcttcttctgattcctctgtttgactgggttggttggtccctaagtcttcagcttgggcgccgcttcttgggctatctgctttcgataagacttgggcaatggctcttttctcaaaggtgaggtagatgccttcacagtctaagacgaccgttcgctcagaatcattttgttcgtccactaccccgtgcaagccaccaatagtcacaactgtgtcacccttttgcatccggtcaatcatggccttgtgttcttcttggcgttttttctggggccggatagttaagaagtaaattaataccataaaaagtattaaaggtaaaatacttataataaattccattacctgcattcctccacaaattttcttattataatcctaacaaaaaagcgaagataaatctagtttttatcgggcttggctggctggacttgaaacaagattacttctcttggtcaggactgggaagttgaaagtggtcataggccttttgggttgccacccgaccccgggccgtccggttgagtaggccagtcttcaaaaggaagggttctaccatatcttcaatggtctccatctcttctccaatgttagctgctaaagtgtttaagccaatggggccaccctggtagagggtgatgatcatcttgagtaatttttggtctagctggtccaaacccatgtcatcaactcccaagaggtccaaagactggcgggcaaggtcttgggtgatggtcccatcgccttggacctgggcaaagtccctgacccgttttaggaggcggttggcaatccggggggtgccccgggaccgtccggcaatttctaaactgcctttcggatggacttcagtggcaatgacctgggctgaccgtcgcacaacctggtctaagtcttcctgactgtaatattccatatgggctaagatcccaaaccggtctctcaaaggagctgacaaggaaccagcccgggtggtagccccaatcaaggtaaaaggcgggagggggaagtgaaccgggtgggctgactccccttccccgataatgatatcaatgtaaaagtcttccatggctgaatagagcatctcttcaatcacccggggcaggcggtggatttcatcgataaataaaatcccccctgggtccaggtcatttaagagagcaaccaggtctccaggcttgtcaatggctgggccagatgtggtccggatgctggtttccatttcgttggcaatcaccatggctagggtggtcttacccaagccaggtgggccgtagagtaggacatggtctaaggcctcttgtcgatcttttgccgcttgaatatagactgataattcttttttgacattatcctggccaatatattgggataagaaacggggtcttagggatttttcgaatgtttcttccgcttggtctagttggctggaaacaagccggttctcttcttccataactgcttacctcctcactggttcacttactggtgcaagagcatgtcaagtccttgccggatataggcatcactggtctggtcatcttggtcctctaaggcctttttgactttttttacttctcttttgctgtaacccagtgcttctagggccaagagggcttcttctaaggctggattggtcgcagcttctttggcctcggctgacgactgggggaaagaagcggaagtcaagtcttgcaagttccctttgaggtccagaacaatctgagaggctgttttttttcctaccccgggaaagcgttgcaaaaactgtcggtcttcattttcaatcgcctggattaagccagcatggtcttcattggccaggatagccaaagcacttttgggcccaatacctgagacattgattaattttagaaacaagcttttttcatcctggcggggaaaaccaaagaggctaagctggtcttgactaacattcaggtaaaggtaaatcttcacttcttggcccagccggtcgttcaggcggaaggggttagccattaaaaggtggtagcccactccccccacttgtaaaaccaagtagctgggttggacatcaacgactgtccctaccatgtattcatacatactttcaccactttttccaatagtcattttattataccacagataaacctagccttttaggtctacttggttcaaaccaccccttttaagtctgctcataataaaaactgtaatagcagaagtaaatccgccattacagctttcttctctagacctcttgactgtccccactttcggcaatcacataatcggtaatgattgaccgggctgggtcagctgtcaccttgaccgtatagatccggcccgattcagctctcaaggtctggataacatagttgcccacccttaacttaaaccggtccgtactagatgggacaaaaccaatttccctggtgatggcaccagccaaggtttcgatatcctcatgggggatattgaccttgtagtagtcattaaattcttcaatatcgatcccagcattgataaaggcattgtttttgtctacttgacgaatgtcggttaagtgttggacatcgttttcgtcatcaatttcgccgacaatttcttccagaaggtcttccatggtcacaatgccctcaaccccgccgtattcatccattaagatggccatgtgctgctgttgtcgtttaaagtcgatcagcaagtcatcgatatacatggttgctggaacaaacaaggggtcataggacaaggctaagaggtcaatctctctttcatccttaacccggatagattttaggagggacttggtgtgcaagatgccaacgacattgtcccggtcaccttggtagatgggaatccgggaaaagggactttctaaaatttcatcgatattctccttgggatcgtcgtcaatattaaccatctggatatcagttcttggcaccatgacagcccgggcaattttatcattcagcgataaaacgccctctagcatagtaaattcttccatgtcaatggacccctcattgtggctttcaaccaaaatggactgcatctcatcccgggtaaaacgttcggtattgtagtcaaagtcatagggcaataccttctgcaagcccttggtagagacactaaccaaccacacaaaggggatcatcaagctatcgataaaggcaaccccatgcaccaaacgcaaggcagcctggtcaggatcttgggctgctaggcgtttaggaattttttcgccaaggacgataaatataagggtcagcaaaaagacaaccaaggcaaagggcaagagccaatcaagtggacccggtaaaaagtctaagggctggatcaagtcatagacaaaaacagaaaaataaacactagctaagacttcagtcagagtgatagctgactgaagcgagctaatgagctggtctgattcactgattaattttaaaagctttttcgccctcttattgtcttccaaggccaaatcgttcatgttttgctggctcaaggaaatataagctatctcaccagccgaaacaaaggcattaatggcgagtaaaaccaataagacgatgaggtgtatggcaagggacctcccggaaacttccacgggcattcgctccattccttttcaacaagttagctataatgcttagttttcaaaatggtcaacatactcttcatagccctgttcagctaattcatctttgggaacaaagcggagggctgctgagttaatacagtagcgtaaaccacccttgtcgcgaggaccatcagtgaaaacgtgacccaagtgggagtcggcttctttacttctaacttctgttctttccatgccaaatttccggtctcttttttcttgtaaaatacgtttttcgatcggttgggtaaaggatggccagccgcaaccagcatcatacttgtctttggaagaaaagaggggttcgccactgaccacatcgacatagatgccttcttcataaaagtcgtcgtattccccagtataagcacgttcagttgcttcattttgggttacttcgtattgttctttagttaaacggtcttttaagtcttttttatccataaaatatcatcctatctatcttgtatccgtttaaacattttctccatatcccggttagtcaattttaccatgactggtctgccatgtgggcaattatagggattttggcaagattttaaatcctggatcaaggcccgggcttctaagtcgctcaagtagtggttagccttgatggaccgcttgcaactcatcatgatagccgttgcttcccgaaattccttagtggaaatgtgctggtgggttaagacaaagtctatcatttcttttattgtagcttcttcttggccattaataaaccaagaaggatgactttttacaataaaagttcgctgaccaaagtcttccaagtcaattccggcccggctcaggtcatccttgtgctggcagatggtcaggtaatcatcagtcgggtagtctaagacaaccggctccaggagggtttgctgggcagtccccgagctagcaatctcttcacggtagtactcatacttaatccgctcctgggccgcgtgttggtcaatgatataaaggccgatttcattctgggcaaagagataggttccgtgcatctggccaatatagtccaggtcgggaaaaccctcttggtcctgggtcaaaccctccccttctaaagcaccatccttccgtaactggtcttgggcttgcttgacaaaatcgccactttcatggcccaagattgtctgagtctctcccctgccctgacctggcccaagagagtcagtcggctggtcttgctggctagaagctaaatctttcctttcttggtcttggtagggttggaaggaatcggacaaatgaccaacttgactggattcatgacttgcctgactaaaagtcgggcttggttttggattttcctgatagggggcatgattgtcactttgattaaagtccaagcgaccctggacagcattttcctgtctatcccttactttgatctggttttggttaatattttccaagccatctggtatccggactgtttggtctaggatctttcgaattgcccctgtgattaagtcagcaaggtctttttcgccactaatccgcacctggtccttggttgggtggacattgacgtccactagttgggggtccatatcaattttaatgacagctaggggaaaacggcccaccattagcttggacccatagccttggacgatggcccgggccagggcatagtttttgatatagcggtcattgacgataatggtcatgtaagaccggttggaccgggatacttccggtaaggacacatagcctgtcaggtcaaagttaaagttggacgcctcaaccttgagcattttcttggctatctgaaccccgtaaataccagcaatggcttgctggagcttgccactaccacttgtattcatcagggtcatgccgtcatgtatcagcttaaaggagacgcctgggtgagtcaaagcaaagcggttgagggtagaagtgatatgagttaattctgtctgcatggacttcaagtgtttaagccgggctggggtgttaaaaaagaggtcttccacttggatcatggtgccagaccgagcagaagccgattgagaggagataatctcacctccagaaaggtggagggcccgacctttgtgaccttcctgggctgattcaatgtggacttccgacactgaagcaatactcgggagggcctctccccgaaagcctagcgttttgatccggaatagggattcaggactaaggagtttactggtggcgtgacgctgaaaggccttgtcgacctcgtcataggctattcctttgccattatccgtcacccggattaattttaagcccgactcttcaatagctacatcgatttggtctgcacctgcatcgatagcgttttccaccaattctttgacaactgaagcaggccgttccaccacttcaccggctgcaatctggtctgccaaactagctggcattatctgaatttgactcatacaatcctcctagtctaatgaagcttttggttcaggtcatttagaaaattaagggcctggataggggtcatattcataatctgggcctcttgcaattgcttgataacctcagcatgcttgttagtcatcgaaagctcttcttctggggcaaagaggtctaactgctgggcctcagacttggactggtcttcagctgactctgctggttggctagtcacttgcttgcttttgcctgcttctagctggtttaggacctggccagcccggtcaattaccggctggggcaggcctgccagttgagctacctggaccccataactcttgtcagatggtccagacaagaccttgtggaagaaaaccagagatccctcttcttcttcggccccaacatgaacattcgtcaaacggtctaggcggtcttctagttcggtcagttcatgatagtgggtagaaaagagggtcttggctccaatttcatcgtgtacatactcaatgatggcttcagctagggccatgccgtcataggtagccgtcccccggccgatctcgtcaaacaagagcaagctgtgactgctagcattttgtagggcatggttggtttcgttcatttccaccataaaggtactttgacccccgaagagatcatccatggccccaatccgggtaaatactttgtcgaaaatggggaggtcagctgacttagctgggacataacagcccatttgacccatgatcaaggtaagggccaactgacgcatataggtactcttaccagacatattgggtccagtaatcaataagatatcttggccatcattcaaatcaacatcattgggcacatattgctgctcttgcatgaccttctctacaacggggtgacgaccttctttaatcgagacactttgactttcagtatggtaactaggtctcacgtaattatatttttcactaaccttggcaaaggcttggaggacatcaatttcagccacagccttggctaggtcttggatggccttgatgtgggccttgactttctccctgatgtcaagaaaaagctcataagacaaggccttagacttgtcttcagcctcaagaatcagtttttctttttctttgagttcctgggtcacaaaacgctctgcattggccagggtttgcttgcggtcgtatcggtcgtcttctaggaggtctaagttggctttggtaatttcaatatagtagccaaagaccttgttataacccaccttcaagttcttaatgcccgttttttctctttccttggcttgaagtttggcaatccactgcttgccatttaccatggcgtccaagtattggtccaattcctcattgtagccagacttaatcatatcaccctccgtgatagaaaggggtgggtcatccacaattgcttcttggatcaattgagccacttggggaaccgggtctagccggtctaataaatctgcccaaacatcttggtcttccatcagggtcaagaggtctttcacttgggggataacctggagggattcttttaattgaaccaggtccttggcattaaccgttccataagccactcgaccagctaagcgttccaagtcatagacttctcttaagcggtcttccaagtcactacgttcaataaagtggtccagcaagttggcaacaatgtcctggcgttttgcaatttgctgggggttaattaagggcttatctagccaatgcttgagcatccgcccccccatagcagtctggctttcgtctaaaagccaaagcaaggtccctttcttactgccatctttgagcgattgggtcaactccaagttccgtcttgcttcttgaccgtatattaggtagtgggaagtctcatattcttgggctacttgaaggtggtccaaactccttttttgggtctgtctgagatagtccagcaatagacttaaacaacttttgtttaaggggtgctggatggctttgtagaggtctttgctttcttggtcctggttaaaatcagacaggtgggagatgactagaccgaaacgcttggttaaatcttcctgcaatcccactagtttcccttgcaaaaaaaccagttcttttatttgcaaggcgccaacttcggtgatgacttcttggtaatcgtctaagcaagtgacctgaatttctccagtcgataaatcggcataggctaaggagtattgcccatcttggtctaaaatggccccgatataagtattagtcttgtcccccatggcactttcttccattacagttccaggtgtgaccacctggacaacttcccgtttaaccatgcccttagtcgtcttagggtcctccacctgttcacaaatagctaccttgtagcccagatcaattaacttattgatgtacctttgagctgaatggtagggaacgccacacatggggacttggacatccgagttcttattccggctagttagggttaattccaagatttgggccacccggttggcatcttcaaaaaataattcgtaaaagtcccccaaacgatagaataaaaaacaatcaggatagtcctccttaatcgataggtattgtttcatcatgggggtgtgttctgttttggccattcatcagtcacctttctaaatataaaagggattttccttatcaatccggatcatctcaatcgaccctgcccgaccgaacttatctatgttgactaaactggcattgagacgggcctcccctacttctggagctttgatccgggccggcaattgggttaaaaacttattgaggatggcttgtcgttccatgcctaaaatgccatcagcaaagcccgtcatgcccacatcgctcacataagcagttccattgggcaaaatccggttgtcattggtctggacatgggtgtgggtgccgactagggctgatgccttgccgtccaaaaaccatcccatggcttctttttcacttgttgtctcagcatgaaaatcaacaaaaatatggggtgtccgtttgttggcttggtcaactaagtctaagccaacacgaaagggatcttccaagtcacccattaaggcccggccatgaaggttgataatagccaattcttggtcgttgacctggacataagttatccccttacccggaacctggtcggaattagggtaattagcggggcggatgatcttgtcctcttggtcgataaactggtagacttccctcttgtcccaggtatggttgcccatggtgaccacatcaatgcctacctgcatcagttctttaaagatgggccgggtaattcctttcccaccagccgcattctctccgttggcgatggtcaagttcaccttatgcttcttttttagggcgggcaggtagtgcttaaccgcctgacgtccgacacgtccgacgatatcaccgataaataaaattttcatgactgacaccttcactctcttacccttcattttaccaagatttggctcacgaaacaaaaaacctacccaagagacttgggtagatttcttgaagacttttgctactagatggctaatcttatcttttggatatttgcttaaagaccttaatcttttttgtgtttgtaagcgaataggccactagccaagcttgtcagaccaaataatcctaaagcccatgttcctgtagcggtgtttggtagtcgttgacccggttttttgctaattgcttgaacggctttacctggttttttgactgctttgtttttgaactctggtttttgttcagtcggttttttatcgcctggtttttcttcacccggcttttgctcacctggtttttcttcacctggcttttgctcacctggtttttgctcgcccggtttttgctcgcctggtttttcttcacccggtttttgctcacctggtttttcgcccggtttttgctcacctggtttttcttcacctggtttttgttcacctggtttttcgcctggtttttgctcacctggtttgcccggctcttctactgggtttggtgagaggaggtagaaccaacgaccattggccccttgtttaactgtgtaagacttgttgacggtatctttttctaatgcttttttggctgctgcttctgctgcttctttagaagagtaaccattttcgttatcttcggctggtttttcctcgcctggctttcctggctcttctactggatttggtgagaggaggtagaaccagcggccatttgccccttgtttaactgtgtaagacttgttgacggtatctttctctaatgcttttttggctgctgcttccgctgcttctttagtggagtagccattttcgttatcttcggctggtttttcctcacctggtttgcctggttcttctactgggtttggtgagagaaggtagaaccagcgaccattggccccttgtttaactgtgtaagacttgttgacggtatctttttctaatgcttttttggctgctgtttccgctgcttctttagtggagtagccagtttcattgtcttcgactgttttttggctattagcagtaaaggttagggtcttgtcgttgtatgaccagtgaagattgcctaggccactattgtttgcgtatttacggaagtatttttctgcttcctcagcacttttagccttaacggtagtcgatcccttagtaatcttgttttggaattcaaatctatatagcttttcttcaagttctttactacctgcctcctggggctctttgtctttgctttcttgtaaactgacttcaaccttatcattttccgaagctgaaaccgcttcaacatgacttaaaattaaactggaaccaattgcaacagaaacaagaccaaggctaagctttttcagtgtaaagcggtgtttcactttagcctcttgtcctagacctcttgcaagtttgtttttgccaaccataattaacactcctttgtatataaatttgctttcgctttagtagggtatggaaaacccacaattgttcatagcttaattgtgagtcctctataaccattacttagtgctaagccggttgttctacttagaatataggctactggcctagaaaagtcaatcgaatattatgaacatttatggcctaaattgttaagaatttctgtgtattaaaacgcattcatatgtgcatatttgaaaattgatggattttaactggttataaccgaacaaaaaagcccaagccagttaatgtctagctttgggcttaagtcatttttgtatgactaagaactttgtgctaattttctgcgttggatttccttgatcggaagttggtcattaatcagcaaactatccggatttaaattttgtttgagtttataaccagttgaccagaataggtaaacgatggctagagacaagacgagggctaagaggtaggacaaaagaccataaccaaggttaaagccaatcggttgagctaggatgtaaattacagtcgcatagagcataaaggcacctggcaagaaagtgatcaagtagttgcgccccttgaggtagagataacgggtagaaacaaagagggaaataacggctgtgacttggttagcccaactaaagtagcgccacaagatatcaaagtctatcgtggtcaagataaaagaaacgacaaagagagggatcgtaaccgccatgactttacgcaaggagtcttgtttcatgccgatataatctgccaggatatttcgcaaacttctaaagcctgacaagccagaagaaatagggaggacaatgacacccaagatggccaaggtaccaaagacattgcccagcaacaagaaggaaacttcattaacaactacagaaggagtaccggctgcaatcatatctgcgagactttgaccgtcaaacaaggccatagctgcagtagcccaaatcatggcaataacaccttcagcgatcatcataccataaaaagtataccggccttctctctcattggttgtggtccgggagaccatgggcgcctgagtagcatgaaagcctgacaaggccccgcatgaaatagtaaagaagataattggaaagactggtgtcccgtctgggtgagggttgttggtcaagttggccaagcttaaattaggcaaggtgtaagtaccggcaaagccatggtagattagcatgccaccaattgccagggtagttaaaattaaaactgccccgaatatgggatagactttccccatagccttatctattggaataacggtcgataccaagtagtaagcaaaaatcaggagggtaatcaaaccaactgttatccctgctggggtcaaatcagcaatcagttcggctggtgtgaccacaaaaactgtggaaaccaaaattaacaggagcatggcaaagatgttgaccacatgtttaaccggtctgcctaaatacttctcagctagttctggtaggtgggccccattgttacggagggaaatcatcccaatcatgtagtcatgcacaccaccagcaaagatacagcccaaaacaatccagacataggccattggtccatacaaggcccccataataggtccaaaaatagggccggtccctgcaatgttaagaagttcaatcaaggcattggtctgctttttcatagggacaaagtccatattatcccgcaagacctcagctggcgtggacctgcccggttcaatttggaaatttcgatccacaaactttccatatgtaaaatagcccaggactaatagtaagataccgccaataaaggttagcatgttctttcctcctaaagttattactttagcttcattataaacctatttcccaggaattggcgcttttagcccccagtgtcattaaaaaagattataagttacagctttagccccctgagttactatcaaatttagtttaagcccaaagcttccttgaagtcttggagataagaccgagaaacaggtattttcatcccattttcaagagtaacttggtaggtttggttaaaccaagcctggacctccttaatggcatccagctggatcaagtaagaccggtggacccggataaaggattcttggcttaatttttcttcccatttaactaaagactgccggtcataatacttgccaccccgggtatagagagtggtctgccctttcaagacttccactgccaggatatcttcgctgtcgacgatcaccaatttgtcccctgtctctaaaggaaagcgtttggtccgaccagtttctttcttggagattggccttttaaccttgagcttctgttccacctggctagacaacttgttaatggagtgctggatccggtctaagctaaagggcttcaagacataatctagggcatcccgctcaaaggccgcaaccgcataagcatcataggctgtagcaaaaatgatagcaggaggattcggtaaggcattaatatcatcggcgatggacatgccattttcgactgacaactggatatccaagaaaaccccatcaacctcaacctcctcgtctgaaataatgtcaagggcttcttgaccagtctcagcctggctcacttggatatcttttgaaatttgatggattaaataggtcagttcgtcacgggctaggggttcatcatcaacaatcaataggtgcatatggcttactcctccctcctagtcttgggcaagtgacagctaacagtggttccggtttctgacgagtcaactttgagctgactgtcgagaccaaaaaggttggtcaagcgcttgtttaaattcagcaaagcggtcccagtccctttactctgactcgacttgacctctttctggcccaaatcctttaaaatggacggctccattccgaacccattatcttggacagtgatcaggatatcgtcaacttcttccttaacttctagtttaatttcattgcctgctttcctccccttaaaagcatgtttaaaagcgttctcaaccaagacttgtaggataaagggtgggactaagacaggtaaaagcccctcgtctacctgaaagtctagctggtagcgaccaggaaagcgggcttgttctaaagattggtaagccttgacatggtctaactcctggcctaaagtgaccaggttagaccgtgctcctaccaagttggcccggaagaaatcgcttaactgactcaaaagttgccgggccttttcactatccagcctaaccatggccgagatggtattaatggcattaaagaaaaaatgggggttgacttgggcttgcaaggacttaatctcagcatcttgcaagagtctagcctggagttcactcttgcccaggtcaatctgggaagagaagatattacctagaccttctgccacttttttctccacaaaggtcaaatcctggctagactcaaagtataatttcaaggtcccgaccaccccttccttggtctttaaggggacgacaatagctgcttggagtgggcagttgggatggccacaggcaatctctgacttagaccgggcgatgacgacttccttgccttcgagcacctgcttggacagacgagtcatgatggggttgccaggcttgtggtggtcatcagccaagccaacatgggctaggattttctccttgtcggtaatgctaacagcagctaacttgatgtaattcatgatttcttgggctgccttgctgcaagactcaatggccaaaccttgccggaaatgaggcagggtggcattggccaaagccaagacatcctgggtctggacagcccggtccataacctgtcgctcttggcttgaccggataaaggctaagaaaatccccatgccccaagctattaatcattgtcatcggcaaaatgataaactggaccaagactaaagcctggtctagccttgagctggcaattaagataactgccatttgaaccagctcaaaagctcctgcaaccaggccaccgaatagaacggtaggtatctgccgcttctggatatagacctggcccagcagacctgataccagaccaatcaatagagaagagatgaggtagacatgtgggtccaagcccccttggaagtagcggacaataccggaaatacctcccactgaaactcccaccaaggggccaccaatgatgcctgagatcccaatagtcaaggctctggtgttagccatggaagaagccggtgctagtttggttaaaatgggacggtaaaccaccgatccggcttgtacttccaccccattgaggttagacattagggcaaaaaccgcaaaaatagccaccaaaatcaattgggtagacaggtctctccggcgataaaagacccttttaaacaagcgggtctggaccaagatgtaagccattaaaatgatcaagcccaaacgttctaccatcatgatgaataaatcgaccatgtcagccactcatttcccctccctttcccttattttaccacaatgataagtattgaacataagtccttttttgaaatttcccccaagctatacttgagtacaatcggttaagggctcgactaataataaactagtccagtcaagaagaccattagcctatctagcttgaaaaagcctggcgtcaagcttcagacctacaaggcatagtaaaaagccgagtacaaatagctgcactcggcttaaagtctttatttggcataatctattgaccgtgtttcgcgtattaccgttactttaatatggcctgggtaatccatggtatcttcaattttcttacgaacatttcttgaaagattagccgcttccgtatcatcgacttggtcaggcttaacaataattctaagttctcgtcctgcttgaatggcataactttcttttaccccgtcgaatgatttggcaatggcttcaaggtcttccaagcgttgaatgtagttttcaaaggattcacttcttgctcctggtcgggctgccgaaatggtgtcagctgcttcaaccagagaagcaatcactgaactagcttcgacatccccatggtgggaagcgatggtattgaccacgacatcctgttcattgtatttcatagcaacttgggcaccgacttcaacgtgggtaccgtctacttcggcatctaaggcttttccaatatcatgtaataagccagctcttttcgctaactggacatcttcacctaatttaccagctaaaataccggcaagtttggctacttcaatcgagtgttgcagtacattttggccataagaggtgcggaagtggagtcggccgacaattttcatcaaatcagggtggatggagtggattccaagttcaaacatggtttcctctccaatttctctaattcgttcatccatatccttgcgggctttctcaactgcttcttcgatccgaccaggatggatccggccatctgcaatcaatttttcaagggccatcttggcaatttctcgtctaattgggtcataaccacttaaaacgacagcttccggtgtatcatcaatgatcaagtccataccggttagactttcaatcgtccggatgttccggccttctcgaccgataatccggcccttcatgtcgtcatttggtaggttaatcacactgacagtgttttcagcaacttggtcagctgcacaccgctggatagcttctgttacgatggtcttagctcttcggttagcttctgatttagccttatcctcatattgtttgaccataacggccatttcccgagtcaactcagcttcggtttggctcaagacctggtccttggcttcttctgggctaagggctgcaagctcatgtaattttgcttcttgtttagatactaatgcttgtgcttcttctttaagtgaatctatttcttctttttcttgactgacacgtgtttcccggtcctggagtgaaatttctttatcgtccaaggataaagaccgtctttctaaattatcttctctttggtctagtcgattttcagatttagaaatttcagcccgtctctcttttaactcttcttcaacgtctgaccggtacttttgtatctcttctttagcctccagcaacgcttcttttcttactgatttagcttcacgattggcttcttcaataatgtcattagctgtttggtgagcttcagaaagttttttatcactgttcttttgcgctaagaaagcaccaagacctaaaccgataattaaagcaacgatagcgaaggcaaatgttaggtagttcacttaatcacctccgtatcattatttagctgtatctattccattcagatctatacaagagtgtatagggtataattgcacttacctgcaaacaacttttatagctagtccacagatagtttaattttaaattgattttcttagcttgtcaacttttaatgataaaaatttaagctatatctattcaaaattaaaaaagcccatgttaagatgagcttttttaatgatacatttaaagattaggcctagttaaactgtttataggtctaaggctgtgctttcttcagagacatcctctgaacctgtttcctcgccattttctccatggtcttgatcatcttcaatcccgtaggcttgacggaccttggcttcaatttcttttcggatgtctgggttttcttctaagaattctttggcattttcccgtccttggcctagacgttcaccgtcgtaagaataccaggcacctgccttgtcgataatatcgacttctgctcccatatcaacaatttcacccacttgggaaatacccttaccatacataatgtccacaatggcgaccttgaagggtggcgctaccttatttttaactaccttgatcttggtacgattcccggttaggtctttaccatctttaatggattcgctgcggcgaacttctaagcgtacagaagagtagaacttaagggctcggccacctggggttgtttcagggttaccaaacataacaccaactttttcccggatttggttaataaacatggcaatggttttggttttgttaattgaccccgataacttacgaagggcttgagacataagacgggcttggaggccgacatgggagtcccccatctccccgtcaatttctgctcgtggcaccaaggcagcaaccgagtcgactactatcatgtcgatggctccagaagaaaccagggcatctgcaatctccaaggcctgttccccggtatccggctgtgacagcaagagctcatctatatcaacacctaatgcccttgcatatttagggtctagggcgtgttcagcatcgataaaggcagcagtccctccttctgcctgaacggctgcgatggcatggagggcaactgttgttttacctgaactttctgggccatatacttcaacaatccggcctctagggtagcccccaattcccaaggcaacatctaagccaagagagccacttggcactgacttaacctgggtgtcggcttgttctcccattttcataatggatcctttaccgaagtttttttctatttttttcattgcttggtctagtgctttttgtttttcatccgataccattctgcaatcctccaaactgatacttatttcatggtttattttaattcatttgagtttaaatagcaagaataaagcgaacgtttgttcaaagttatttgatcaggtcataaagcttggtcattagggcaacttggatttgtttgtcagagacagtcttgcggttagataagtctaggtcaaagtggtgagtctgaccttgaacggcaaagtagagagagacttgcttgagcaacttgttggcttcaccagccctgcccaaaaccagtaaggctccgttgcctgctaaagctgtagcctggtcttgcactagtgactgtagttggtctgaacttagttctgaatggccgaagtacttgcctagcttagcgttgtcattaaaactcaagaccgactccaccaggccatgaggtgctttgggggccagcaaggcagaagagagaatactgtggacaccactttcaataatattgagccggataccttcctggtccaagagcgacaagaccttgtcggtgatggtggtagccccctccccgtaaattttgtccccgactaagtccctgatctggtcttccacttcctggatcaaggtttgggcatgggctgagctatccgccttggctgaaatccgaatggtgggctcggaatccgtaatgtagatagctatggtcggattagtctggccttcgattaccgggtcgatggattgggctagttgggactccgtaatattatagaggcggaggattttagattccaaaacagccttgtcatccagttcattttgcaagaggtctaacaagtgataagtgaccatctgcttcatttcagctgggacacctggaaccatggcaatgattttgccttggtgtttcaagaaggatcccggtgccatccccacctcatttggaatcttctggctgttttcaattatcaaggcttggttgacattactagctggcataggccggttggacctttggtagatttctttaatttcagctagtgtttcctggtcttcccatacctctaaacctaaggtatcagcgacaatagacttggaaatatcatctttggtgggccccaacccccctgagaaaataatcaagtctgaccggtccaaggcaatttgaaaaacttttttgatccggtccgggttgtcccccacaacagtatggtaataaagatcaatgccaagttcagacaagctttgggaaataaaggctgcattggtattgaccacctgccccatcaagacttctgttccaatggctatgatttcagctttcatccattcgacctcctagtataatatacgcaaaaaatccttgtattcatttttttatttcaacttttaaccctagtttatcaaaagacgagtcctaggtcatttaatccactagcctaatgaagccctagccccaaaagaagacaaaaaagcccgcggttagccacgagctttctaggtctagttatccgtttttacatggaccccttaaagatatgtctggcattccagaagtagtcaataccggagtatatggtaaagaagaggcaggtgtaaagtaagatttggcccaaggggagggatattgcttgcaaggggaagttgtcaatcaataaaaagatgatggcaaacatttgggtcactgtcttaatctttcctggcaaggctgccgctaaaacagtcccgccctgctcgaccaaaatcaagcgaagacccgtaacagccagctcccggcagacaataatagcaaccacccaggctggggccatgccaagttcaactaagataataaaagctgtcataaccaacatcttgtcagccaagggatcggcaaatttaccaaagttagtggttaagttgttcttccgggccaagtagccgtccaggtagtcggtcaaactagccacagcaaaaaccaacatggccaaaaacatccggctatcaacttgggacccccagccttggatagagcctaggtcaaaaggaactaaggctaagaccataaagaccggaatcattaggatgcgaaagacagtcagtttatttggtaagttcatctattccctctcttccttccagtgaagtagtcggggcttagctagtatcttagccattgccagcctcaattccctctgggtcatcctggtcttgctggtcagcttctagctcatcctggccttggtcgtctgctggctctggatcctcggcttccgcttctgggtctaaatcctcattttggtcaccagaatcttctggcataatttgagccggttgatcgcctgaagactggataaaggcctggtctggttcagatgtaacagaagaagccgctacgtaaactccgacaataatggcaatcactaaaatgacgacgataatcatgggcatggacgaaacaatggtatccaaactcccattactttcttggtaaaaaggctttttaccagacttgttttgtttttttttagtctgctgggcgaagtaacgatgattggcttcctcaaaatcttgggcagtctggtcgccatcaaaccccagctcttcagcatagagtttgacaaaagtcttcccataagactcccccggcaggatatccaagttgtcttcttcaattgccttaatataccgtgccttaatcttggtcttttcttgaatatcttcaatagtatagcccttagacatgcgggcatctttcagtcgttctccaattgagtacatgaaaaagctcctaaaacttaaagtattcgtcaatacagtttattatagcacagaccgagcttggattttagtctatttaggcaatactttaaaaacagatagatagtcagggtctaggtagtccttaacgatttggccaaggtcatccaattgaatgtcttggacaagctcttggaggtcaaagacgttgaggtccccttctattttttctgttaattggttggcaatatattccagtgagtttaaggactggaggttcttaccaatcaagtcccgtttgacctcgtcgaattgttcttggttaaagtcttcttgatccgtctgcttcaagaggatggtcttgatgcggtcttcaaatctttgagggtgcttggtgtcactggtaatggaaataaagttaaaggaccggtcaaagttgacgtcacaataaaaactgtcgtcaataatttcctcattatacaagctgaggtagtgtttggatgaagggcctaagatcatgttaaagaagatttttaagctaatttcttgcttgagcctttctaggcctgctaagtcagcctgcttgcctcgaattccgactgccactttgggtctggaaacatccattttgacttgagcttcttttttaaaatggctaaggtctgcatctggcttatgtcgcttgataacttctgctggggcaaatgtcttggcattttggttgtcttcaattaaggccatcaagtcctctgggtcaaactggccaactaccactaaagtcatattacttggatggtagaaggtatggtagttttcgtataattggtcactggtgatcttgtcgatactttcgacagtcccagcaatgtcgatgcttaccggatggtccgggtagatattttctaagaggccaaacattaaccgccagttgggatcatcatcatacatttggatttcttgaccaataatccctttctctttgttgaccgtttctggtgtgaagtaggggtcttggacaaagtccaggagggtggttaagttctctttgacatagtcactggttgagaaaaggtaggctgttttggtaaagctggtaaaagcattagcagccgccccgtaatttgaaaactggtggaaaacatcgccatcttctttttcaaaaagcttgtgttccaaaaaatgggcgatgccgtccggaacctccttcatttcctcttggccgagagggacaaaacaattatcaatggacccaaagtcagtggcaaagatagcataagttttgttgtaatcttttttgggtaggagtttaacggtcaagccatttgctagggtatccgtatagagggtttcaccgatttggtcataaactatttccttcatctgtctgctcctctcaagataaagatagactggagtttaatgtcttgcgctaggttcttaacatcctgagccgaaacttggttgatcttttcaatccattcttctactgtgatggacttggccaataactgtttcaaataggaaaagttgagcaagccagctggtgaatcttccgactgcttcaagccatttttcagcatggccttggcttggttcaaactggattggctaaagtctccttcaataagggcctggtgttgatccttgatcaggtcaatcacccggtctgcttctttctgatcaatccccgcctgaacatataagcctccgcgaaaggggtctaggttactggaagcatagtaggctaaactctctttttcccggacatttaagaagagtttagatcccgggaaaccaccaaagagggcattaaagacttggagggtaaaatattgatcatccaagtaacgaacatcagtctggtaggccaggttcaacttggcctggatgaggtcttgaacttcttcctggcgctggaagcttggtaggtcctggtggtagtagaagtctaagtccaagcgagaccggtcttgaaatttgaagtcagaaaatagcttagccaagaattcttcattagtatcgcctaaaaccacaatatcgatttcatcttgggctaacattccctgataggcttggtacaaactagcattatctagctggtccaaatcctctaaccgaccatcaagggaggaagactgggccggatcggtaaaaaattggtccaataatttcagcttggcatacagccttttgtcgtcataaatggattccaagtcgtcttttaaattggctttttctcgctcaaaggtttgccgatcaaatccctctgagcccaagttgggtcttaaaataacggctttcaaaaactgaagcgctttttccaataagtctgggtcttgaacaaattgatcgttgacaatcctcatgttgaaatacaagctgtggacccggcctcttcgtccgacacttgtaccaaaactagccccataaagtttggctaaggccttttgtaggtcaacctggctaggatagtctcggctgttgcgttctaaaatccgagccaatagagaacgttctgttaatttttccagacttagattacttttgaaggcaattttaatagaaagggtcttaaatttcttgcttgggattagggttaagtttacccccttggctaattgcatggccatcctcctctgattagttatttttgtcattcagtagtgttttcaaatcctccaccttgtccaaccgttcccaaggcagatccagatcgtcccgaccgaagtgaccgtaagtagcagtttgcttgtagataggtcgttgcaagtccagcatttgaataatgccggctggtcgcaagtcaaataattctcgaaccttggccgttaatcggtcatgatcaacccggccggtgccaaaggtattaatatgaatggaaacgggttgggctacgccaatggcataagctaattgaatttccacttcatccgccaggtcagctgctacaatattcttggcgatgtagcgagccgcataagaggctgaacgatcaaccttggtggcatccttacccgaaaaagctccgccaccatgtctggcataacccccgtaagtatcgacaataattttacgtcccgttaggcctgcatctccctttggccctccaatcacaaaacggccagtcggattaatgaagtacttggtcttgtcatccaataagtcttgaggaatgacagcttgaatgacctgctttttaatatcagaagacagctggtctaaagacacatcagggtggtgctggcttgagatgacaattgtgtcgatccgcttaggcttttggtcttggtcatactcgaccgtgacttgggccttggcatcgggtcggaggtagggtaaactgtcatttttgcgtaattcagctaggcggcggaccagtttgtggctaagggaaataggcaagggcatgtattctgacgtttctttcgttgcatagccaaacatcaaaccctggtcacccgccccaattttgtctaaaatatcttggctttgacccttgaattcgctcgattcgtctactcccatagatatgtcttgtgactgctcgtctatggatactaaaacagctacattgtcggcatcgaagccgtacttagcccgggtgtagccaatgtcttttaatgtttcccgaacaacttgggccatgtcaacataggcagtggtccgaatttcacctgtgattaaaacaagaccagtattgactgtgacttcacaagcaacccgggattgactgtcttgggctaaaagggcatccaagatagcatcggaaatttggtctgctaccttatcagggtgaccttcagagacggattcggatgtaaataattttctttctttcatttaagattcccccaatattctattcggttacaaggcttccggcttagactgccgtcctatcgggaattcaatgtaaaccattgttaattatagcacactaatggccttttaacactaaaggcccctttgcactagacgcattcaacttattcaaaagccagaaacaaggctaatatttttatggtacaatatgtggtgaatacgcagaaagaggtggctttattgaattatcttgatggtaagcgacttgccaagtccttactccttgtctttttacccttgctgagtgtcttcccaggcatggccctcagcctccattacggcaacttcaatgccttttccagctttttatttttactttttgtcctttttaatgcttttatccagggtctaatcaaatctagcccagataaacaaatcccccatctggctattggcttatctatcataaacatggtaatagtcttggtgctatccttaaaccactcctttttcttaggatttaacttagtcctctacatggtgctcattcatataagacctatattttactattatcatttaaatatcttttattccatcttactcttggtcttccaagccatttttttaaacctagcaagtttttttattaatatgaactttatttccctaaacttgcttctctttatagctcccttaatcttaccctacctactctaccaggaagctagattttttaaaaaaagaatttacttaagcaatattcttatttttatgtcaatagctacaacaatccttgccatggtctttgctgtccagttctggtccctccttgctttatttgctgtccccttgatttattacttgagcaaatttttaagtctccatgccgtttatacctgtctttttactataactttattccagcttatttttattacgctctattaagtaataagtaaaagcaaaagagtccaagatctctaaatgggatcttggactctttctgtcttcagaataaaaatggcgcaggacagagtcgaactgccgacacacggagcttcaatccgttgctctaccaactgagctactgcgccatttgaacgaccctgaccggatttgaaccggcgatctcctccgtgacagggaggcgtgttaaccgctacactacagggccatataacaaggaggataagggattcgaacccttgcgtgctttgacacacctgacggttttcaagaccgttcccttcagccggacttgggtaatcctccacacttggatgacccctacgggattcgaacccgtgataccgccgtgaaagggcgatgtcttaaccacttgaccaaggggccttaacaaaaaaataaaacggagaaggagggatttgaaccctcgcgccggtaaaaaccgacctacagccttagcagggccgcctcttcagccacttgagtacttccccattaataataattaatattaatgggcctgagtggactcgaaccaccgacctcacccttatcaggggtgcgctctaaccagctgagctacaggcccgttgtcaaaaataagccatgttctacgaaacaaaagctataaaaagcgggtgacgagaatcgaactcgcgacaacagcttggaaggctgtggttttaccactaaactacacccgcaacttgctagttgacgaccccgaccggatttgaaccggcgatctcctccgtgacagggaggcgtgttaaccgctacactacggggcctctatgtagtgcaattgcgggggaaggattcgaacctacgacctccgggttatgagcccgacgagctaccaactgctctaccccgcgataataaaatcgggaagacaggattcgaacctacgaccccttggtcccaaaccaagtgctctaccaagctgagctacttcccgcagttatgatgcttttgttcaacgcacccaagaggagtcgaacctctaaccgcttgattcgtagtcaagtactctatccaattgagctatgggtgcttcatcgcccggctagctaaatactttgaatccaataaaggaaaacacttagctaagcaagcaggaacaagatatataagcggaagacgggattcgaacccgcgacccccaccatggcaaggtgatgttctaccactgaactacttccgcattagttaatgccggctgaaagacttgaactctcgacctactgattacaaatcagccgctctaccaactgagctaagccggctttattatttaaaagtgcgggtggagggacttgaacccccacgccgtgaagcgctagatcctaaatctagtgcgtctgccaattccgccacacccgcattaggttaatgagccatgctggattcgaaccagcgaccctttgattaaaagtcaaatgctctgccagctgagctaatggcccatgtaagtggaggttataggacttgaacctatgaccctctgcttgtaaggcagatgctctcccaactgagctaaacctccattattgtgcgtggcaacgtccggctttcacacagggaaaccctgcattatcctcggcgctcagaagcttaacgactgtgttcggcatgggaacaggtgggtccttctggccatcatcaccacacattcggccttgttccttcaaaactgactagttgaaccgtcaacgccaccgaaatctcacttactcacttgcgtggttaagtcctcgaccgattagtacttgtccgctccatgtatcgctacacttccacttcaagcctatcgacctgatcatctctcaggggtcttacttccttcttggaatgggagatctcatcttaaagggggcttcacgcttagatgctttcagcgcttatccttcccgcacatagctacccagctctgccatgggcatgacaactggtgcaccagcggtgcgtccatcccggtcctctcgtactaaggatagctctcttcaaatctccaacgcccgcgacggatagggaccgaactgtctcacgacgttctgaacccagctcgcgtaccgctttaatgggcgaacagcccaacccttgggaccgacttcagccccaggatgcgatgagccgacatcgaggtgccaaacctccccgtcgatgtgaactcttgggggagataagcctgttatccccagggtagcttttatccgttgagcgatggcccttccatgcggaaccaccggatcactaagcccgactttcgtccctgctcgacttgtctgtctcgcagtcaagctcccttctgcctttacactctgcgaatgatttccaaccattctgagggaacctttgggcgcctccgttacactttgggaggcgaccgccccagtcaaactgcccacctgacactgtcttcccacccggttagggtggcgagttagaggggtcataccgttagggtagtatcccaccaatgcctccctctagactagcgtccagagttccttggctcctacctatcctgtacaaacggtacaaacactcaatatcaagctacagtaaagctccatggggtctttccgtcctgtcgcgggtaacctgcatcttcacaggtactataatttcaccgagtctctcgttgagacagtgcccagatcgttgcacctttcgtgcgggtcggaacttacccgacaaggaatttcgctaccttaggaccgttatagttacggccgccgtttactggggcttcatttcagtgcttcgcttgggctaacacgtccacttaaccttccagcaccgggcaggtgtcagcccctatacgtcttctttcgaattagcagagacctgtgtttttggtaaacagtcgcctgggcctattcactgcggctgacttgcgtcagcgccccttctcccgaagttacggggccattttgccgagttccttaacgagagttcactcgctcaccttagaatactcatctcgacgacctgtgtcggtttgcggtacgggtcctttctttctccctagaaatttttcttggcagtgtgacgccgatccttcggtactcatcttccctccccatcactagtcaccgtcggtgcgaagcttttcactcctcacctagctcctagcttggacgcgctagtccagcagcgcgctactctttgcctcctgcgtccttccgtcagtcaaacgaaagaaagaagtacaggaatatcaacctgttgaccatcgcttacgccggtcggcctcagcttaggtcccgactaaccctgggtggacgagccttccccaggaaaccttcgtcattcggtggacgggattctcacccgtctttcgctactcataccggcagtctcacttcgatgcgctccactggtcctgacggtccagcttctccgcccatcgaacgctctcctaccatagaaattctatccgtggcttcggtaccttgtttagccccggtacattttcggcgcagggccactcgactagtgagctattacgcactctttcaaggatggctgcttctaagccaacctcctagttgtctaagcagccccacatccttttccacttaacaaggatttggggaccttagccgacggtctgggttgtttccctctccactacggatcttatcactcgcagtgtgactcccggactggcatgggtggcattcggagtttatcaggattcggtaccccgataaggggccctcgtccaaacagtcgctctacctccaccatgcaccatccgaggctagccctaaagctatttcggagagaaccagctatctccaggttcgattggaatttcaccgctacccacacgtcatccccgcatttttcagcatacgtgggttcgggcctccagtgcgtttcaccgcaccttcaccctgcacatgggtaggtcacctggtttcgggtcgacgaccgcctactcgacgccctcttcagactcgctttcgcttcggctccgcttcttcagcttaacctcgcagtcgatcgtcactcgccggtccattctacaaaaggtacgccatcacccataaacgggctctgactacttgtaagcatacggtttcaggtgctctttcactcccctcccggggttcttttcacctttccctcacggtactggttcactatcggtcactagggagtatttaggcttgggagatggtcctcccggcttccgacggcatagcacgtgtgccgtcgtactcaggatcctcatgggtcgaccgctcggtcggttacagggctatcacctgctctggccacccttcccagggtgttcaccttaaacggtcaaacccgacattgagtcctacaacccagacatgcaagcatgtctgtttggcctctttccccttcgctcgccgctactagggaaatcactcttgttttctcttcctacagctactgagatgtttcagttcaccgcgtcttcccctaagaaagctatggattcactttcctagtcccatccgactaaagatgggaggttgccccattcggaaatctccggatcaaagcttacttacagctccccgaagcatatcggtgttcgttccgtccttcatcggctcctagtgccaaggcattcaccgtacgcccttcttcacttaaccgaagttaagtgagtatgtgtagcgttgtgttctcgtttattgccttgcaataaaatagactcttcaacgtggaatgattgttcattccgctatctcggtgttgtcttcatttgatgataaatgtcgattcaactattcagttttcaaagaacaagggaaggaatacatccttcaaaactaaacaaacaatgacctaatgcaagttccctgccctctggcaggatccttagaaaggaggtgatccagccgcaccttccgatacggctaccttgttacgacttcaccccaatcatccaacccaccttcgacggctggctccaaagggttgcccggccggcttcgggtgtttcagactctcgtggtgtgacgggcggtgtgtacaagacccgggaacgaattcaccgcggcattctgatccgcgattactagcgattccgacttcatgcaggcgagttgcagcctgcaatccgaactgagaatggctttgggagattagctaaacctcgcggtctcgccactcgttgtaccatccattgtagcacgtgtgtagcccagctcataaggggcatgatgatttgacgtcatccccgccttcctccggtttatcaccggcagtcttgctagagtgcccaactcaatgctggcaactaacaataagggttgcgctcgttacgggacttaacccaacatctcacgacacgagctgacgacaaccatgcaccacctgtcattctgtccccgaagggaacgcttcatctctgaagctagcagaagatgtcaagagctggtaaggttcttcgcgttgcttcgaattaaaccacatgctccaccgcttgtgcgggtccccgtcaattcttttgagtttcaaccttgcggtcgtaatccccaggcggagtgcttaatgcgttaactccagcactgaagggcggaaaccctccaacacttagcactcatcgtttacggcgtggactaccagggtatctaatcctgttcgctccccacgctttcgagcctcagcgtcaatcatagcccagaaagtcgctttcgccactggtgttcctccatatatctacgcattccaccgctacacatggaattccactttcctctgctacattcaagtccgccagtttccaatgccgttccacggttgagccgtgggctttcacatcagacttaccggaccgcctgcgctcgctttacgcccaataaatccggacaacgcttgtcacctacgtattaccgcggctgctggcacgtagttagccgtgactttctggttgggtaccgtcaagggataggcagtgactcctatccgtgttcttccccaacaacagagctttacgaaccgaagtccttcttcactcacgcggcattgctccatcaggcttgcacccattgtggaagattccctactgctgcctcccgtaggagtctggaccgtgtctcagttccagtgtggccgatcaccctctcaagtcggctacgcatcatggccttggtaggcctttaccctaccaactagctaatgcgccgcgaggctatccataagcggtagcagagccacctttcattttcccagcatgcactgggaaaacctatgcggtattagcacccgtttccgggtgttatccccctcttatgggcaagttcctcacgtgttactcacccgttcgccactccgcctcttcctgcaagcaggaaaatttggcgttcgacttgcatgtattaggcatgccgccagcgttcgtcctgagccaagatcaaactctcgttttaaaagagttcaggttaacacctgttctatcttggttcattgttgtcataagtttttaaaaacttatcaaaagtacttgaattgtctcactttacaaaaagtaaagcttgagacccttgcactttttggtatcattgtttgttcagttttcaaagatctattccgtcgcttaaacgcgacatcttacatagtatcatgacccttttggtcttgtcaagaagaaatttgagttttccttcttaacaaattaacactacttttatattctaaacaattgatttacaaaagtcaatgttaatttacttgtaagcttccgtcgctcatcggcgacaagatatatagtaccatcgtcccatataagtgtcaacacttatttttaattttgttttttagtctctagagtaatcaaacatatgtgacacccgcttctaggaataacgcttgttagcctaaacaaccaactcattttttcgccctgccggtcaaggaggaaagcgtagcggtccttgacggggagaagaaaaaatgtaaactgatgaaggctaagaagcgacttctgccctatactgatcgaccacttgattaggacttcgaaaattgaggacttttcggacaatgttattatggcgactcatataccgctggtgttgcttcttcatatccgcttccgatgtaaaaacgcgcttactataaaaacgaacttgatcttcccggtggcttctttcgacctttccgttttgccaaggggagtagggccgggtggttcggtactgaatgccaagctcttttaagcgttgttcaaacaaggtctttttcgttgttttatcgggatcgttaacaaactcagccccattatcagtttgaaccatctgaatttgaaagcccagctggtcttgtaaatcaagcagaaattgggccgtatgcgtgacacttttttcgtcgacgatggtactgtgtcgtttgcgagagaactcatcaatggccgtgatttggtagtaacgacggtcataactctcaaactgaatgcattcatgagggacgtatttgatatcaatttggactttttcaccgggataagacaccgggtccggttgccattttgatttgggatagcgtttggggacagcttcttccgacatcccccatttgcggtctctaatctgcttactcatactgccataggaccgacgatagccccttttctgacattcaacgtaaacctgggcaagcccttcatggccgtagcgttgataaacttttttaatcaaggtcagctcctctttttggtgctgacgaggatggctatggggccgagtggactggtttcgcagactttcgaccgtgccatcataacggtcacgccaccgtttgacctgcatccggttggtgtggtaacggcgggctgcttgggcattgttgccctgtttgatcgcatattttacaactttttcgcgatagcgcatttcttctgttataatagccatacgaggatgcttcctttctgttgggtgctaacttcagtatagcagaagcatcctcttttttaatggttttgtgtcacataagtattatactctaacatatttttaattttgttttttagtcccaagatttttccgaaaaaattcggtttcatacaggcctctaggctttgccaagctaggtagcaaggataattctcaaaataaaaaccggacttggtcgaccaagtccggccctttttgcctttttagggcagtcggttattgagctctgtagctaaatcttcgtagcctggtttacctaataaggcaaacatgttttccttgtaggcttccacacctggttggtcaaatgggttaactgcattcaagtagccagaaatcgcaacagctttttcaaaaaagtaaaagaggtaacccaaagtataaggactttgatcaggaatagtaataacaaagttagggacctgaccatctgtatgagccaaaagcgttccttggaaggccttggtgttgacaaagtctaagtctttgccctctaaatagtccaaaccatccagatcatcttcttgctctggtatggtaatgcctttttgaggctggtcaattttaattactgtttcaaaaagattgcgccggccttcttggataaattggcctaatgagtgaaggtcggttgaaaagttggcactagacgggtagatgcctttctgatccttaccttcagactcgccaaataattgtttccaccattcggataggtagcggaggctaggttcatagttgattaatagttcagttaccttacccttgcggtataaaatatttcttaaagctgcatattggtaagcttggttatcttctaggttggggttagcaaaatcttggctggcagcttgggctccagccattaattggtcaatatctgccccacttactgcgatgggcaagaggccaacaggagtcaacacagaaaaccggccgccgacatcatctgggataacgaaagtttcgtagccttcttcatccgctacagttttcaaggctcctttggacttgtctgttgtagcaaatatgcggtttctggcttcgtctttaccatatttcttttctaagagatgcttaaagacccgaaaggcaatggccggttcggttgtagtcccagatttggaaataacattgactgaaaaatcacggtcccccaccaactcaactaagtccttgagataagtagaagagatactgttaccagcaaagaaaatttgcggtgtagtccggtcttcctgcggcaattcattgtaaaaggaatgattcaaaaagtctaaagctgcctttgctcctaggtaagatccccctataccgataacaatcaggatatcagaatggtccttgattttttcggcagcctgtttgatccgggcaaattcatccctatcgtagtcagtcggcaaattaagccaacccaaaaaatcactcccaggtccaccaccctcctggagtagctggtgggccgattcaacttggtcttttatatggctgacttcggtttctgaaataaattggccgataacatttctatcatcaaaatcaatatgggtcataaaaaactcctttactggctagtctaatcatcgaaagcttggaaccccttcaatatttaactggttaaaagtttcttttaagtctcggtggttcaaccaagcatattggtcaggttccttaactaatttgttgacattatccgtttccgttggtgggtaagaaaaaacatagagaggaatgttttccccttcatggcaggcatttgttaattcaactaattcgagcttgtcgaagttaatggatacaatggccttaaacgcttcaatcatggtggctaaagccgtacagtctttttgggagtctgtgataataaacgatttcgtttctttattcaccaaaaagtacaactggtcatctgctgtctcagctataattgttccaactatagaagccatcttgtcatcctccatctcttgtgtctaatggcctttatccttcagctcctttagagcatctcggatccattggtcgagtttctggtcaatgggttcaaagtcactacccgtccgcctaccataccttggcgtcttcttccgcttggcgaagggatggactgggctatcatgtagggctcggatggaaagagatatcttttggctatattcatcaatatctagaataactacttttactttctgacctacttggacaaaatcagtgatatttttgacatatttgtgctcaagttcggaaatatggatcaagccttgggtgttctcatccaatttgacaaaagcaccatagggttgaatgccagtaactaggccttcaacacgattgccaatcttataggtcatatcttcacctcaaatctcggtaagtaatcctattaaataaaattataccatgcttggcttgtcatttgaacagaaggcctatgagtaagcgctttacagagacttgaaattaaaaccaggtcctttaacctggccttaatttaaactattttgctttttttaatacccaggataaaaggagctattcttttatttcgatactatcgataactacatcatccaagggcttgtccatgctattgcgtgaaacctggctgatggcttgagctactttaagaccagaagtcacatgtccaaagacggtatgcttatggtccagccaaggagtcccgccttgatccttgtaagcttcaattatcttatcagggaagccggccccttttaattgacccagcatttctttgggaacctggtcattggtgacaataaaaaactggctaccattggtattgggaccagaattggccatggacaaggccccttttaggttaaaaacttccatactaaactcatcttcaaagggatggccatagatactctccccacccatgcctgatccagttgggtcgccagcctggatcataaaattggggattacccggtggaagattaccccatcatagtagccttttttggctaaagcaataaagttcttcaccgtcttaggggcttggtcttcgaacaagaccaagtcaatttcccccatattggtttgaatagtagcctgattagtctgtctgtcctctaaatgtaactgcggaaaattagtcatataagacatcctttgcattataatctcttccaatcataccggaaagatctggagatgaaaataatcttaggtctaagtgggtgaaaatttttatcagtgcctcttttccattatcatgatagaatgggatgcaatgagaaaaggacgtgtagtttttgctctttaacaattacccactcgttgctgctttagcagccattttaatttcacagatccttaaaatccctattgccatggccctccgacggtctccaagcatatgcctcctctttacaactgggggaatgccgagctcacattctgctggggtagccagcttggtaactgccttaattgtagtgaaaggttggcagtctcacttaaccgcaattgccatcacttttgctgtcattgtgatttttgattccatgggggtcagacggcaaagtggcgaacacagtattttaatcaatgaactcttggatgattttaaatccttacgggagagcctggcgaagatcgaccaagacgggaagctagatttagccaccgttgaaaaacattcccggcagatgcttggccataagcccattgaagttttcttcggggtcatagccggcatcctcatttccttgatcttatattttattttttaccagtaagcaagtttatcgcaagaaaaaggaggaagacttttgaaggaagaagcaattagtgacatcaccatcatcgggggcggtcctgttggcctcttcgctgctttttacgctggattgagacaagctaagaccaagctgattgaatccctgcctatcttaggtggtcaacccaatattttatatcccgaaaaagagatttatgacatccctggccaccctaagataaccggaagcaagataaccaaacagttgatccaacagctagaccactttgaccaggacatttgcttgggtgagaaggtccaatccatccaaaaaaaagaaggcatgtttcagatccaaacccctaagcaagtccactattctaagactattatcattacagtcggccagggagctttcaagccccgcaagcttccctttgattatccagcagtttttgaagaccacaacctccattatgtggtcaaagaccgccagtcctttgccggtaaaaatgtggccgtctttggcgggggtgactctgcagtggattgggccttaagcttagaaccaatcgccaagcaagtctacttagtccaccgccggccaaaattccgggccatggaaagttcggtgcaaaagttacaagactcaggtgttgagatcataaccccttttgttgctagcgattttcaaagcaaagacggaaagacgatttctgctacaaccctaaccaaggcccggtctgatgagacatttgatctaccagttgatgcagttattgtcaattacggtttcgtttcctccttggaaggaattgataattggcaggtggaccaccaagctggcggaatcactgtggaccacaggatggccactagccaagagggaatctttgcagcgggagacgtagcttcctataaagacaagatcaaactcattgcagtcggctttggcgaagcccccattgctgttaaccatgccatccgctacattaacccagacgaacacctccagccaatcttaagcaccagcttaaacttaaattaacatcaaagctgtagactaaaagtatgaaaaggaagatatttatgaatatgcaaacagataagagattaaatgaaaaggcagtagctggcattctccaaagaggggtccagttagaagaaattgccgaattggtctatgacctgcaagaatcctatgtcagcaacctgaccatggactactgcctagaaaatgtcaaaaaggtactcgaaaaacgggaagtctgcaatgccgttattacagggattgaacttgaccgattaactgaagaaggaaaggtgtcagaacccctctcctccatcatcgaagcggatgaaggcctgtatggaatcgatgaagttttagctttagccatcgtcaatgtttatggatccattggcctaaccaatttcggttatctagacaagttaaagcctaaggtaataaagcgtttggacaaccacaagcacaaggaccaaaccaacaccttcttagatgatattgtcggcgccattgccgcagctgctgctagtcgaattgcccacgccgaccccgatgtatccaagaatatgcaataaaaaaccagcaagtgccaccccaactcggttgacacttgctgtttttatttacggctaaaccccttgtctgagtcggtcccgcctagccaaaacgtagccagtaataaataaagcttcaatcaagacaatggcaaaagcaaaacacaacataaagaagtcctgggttaagacattgataataggatcggtttgaggattaaatagccaggcatcattgtcaaataaaatttcatggaaggtcaaaaacaagcggtcaaaattgatggctaaaaagaccaaaagacccaaaggcaggatggccgcaaccagggcaggtttttccaactcgtatacttggttggtttgcttgagtttcaccaaatagtaaatggcaaaaggcagactgacaaagagtaggccataattgagtaaaaagagttgcttgacttcataaaagtgaaaggctccactaggggaggtgggaaagtctggcatggcaagttcggtcacccaaggaaagtggaggtattctaataagacatagtaattctccattatccggtctatggataggccgacctgttcagggatattatttagggacaaattaatttccagtaaaggcgttaagaggatggttactgcaatggcaaaggttacaaccgccacaaacaagaacaagtaaaagatgacatcctttagcctacttcttccccccttaaacatccgtcaaccaatcgtcaagactgttaatagtgtgggtgggctgcttgtctttttcagccaattcttcagggctggtcaagccagaaaagaccaggatggtgtcaatgccattgttaatcccagctaggatatctgtatcataattgtcgccaaccatggccacatcttccttggcaaggcctaagcgctcaatccccttgtccatgatggtggcttctggtttaccaatatacttaggctcctggccggttgcccgctctaaaaaggctgccaaggctccagcactcggagacatgcctcggtcagtcgggatattggtatctctgttagtgcaaataaattctgctcccttttggatggccaaggttgctatattaaatttctcataggttactttccggtctaaaccaactaagacaaaatcaggctggtcttcatcccacttgtagcccgcttcttctacagcatctagcaagcctgattcgccgataatataaacagagtcccctggccgggaattcaagtagtcaacagtggctaatgaagaagtgtaaacttcttctgcctgggcctgaacccccatcttgcctaacttatctgcaacatcctggggtgaggcggtcgagttattggataagaacaagaaaggtagattggcctggcgcaagcggtcaataaaaggtccggcctcttcaatggggtcaggccccatatacatagttccatctaaatcgactaaatagcccttgtaatcctgtttttcatccgacatactaacactcctttattgcttacggtttatcttaaacttggcttgtcctttttcatctttgacggtttcaacttcattgtagtagtcatcttcaccaggctggtagtggtatttttgccgatttttctttttaaacttcggcgacctgcttctctttttgaagtctccaccagctttttgctgttttcgtcttttatttttcttatttttttggtgtttataccggtccttgttatgggaaggttggcttttatagttaaacatttccggcttgtagggatggaaatttgtgatctcagcctgccgttccaagacaaagtaaggggcggcaaaactgcaatcttccattatataatcatctagttggccaattttcatctcttcgggaaccttgtcttggtcattgcggtaaaaacccttgagtcgtaactgacccttagagatatcccctacgatgtagtgaaacttgtcaaaaaaaggagtatagcggtcattaacctggtcgatatctaaagcttgaccttggtcttccaagattaaataggttgccccattgaggtccaagtgttcagcatcaagtcgtttaaccaacttgtcttggtctacccccttgacttggtcatcaattaaggcatccactttagggtcaagagaagccttactttttttagccatgaactagcctcctttctaaaagttagattggatttctctcctattttaccacagatcctccccccttcaccaatgacaattctaaaggagaaggaaatcataccctctagtctttggcttatgctataatagaacttgaattatttccctagagaggttggtatcttcgtggtccaaaaatattatgccgtcaaaaagggccggaaaccaggactctacacctcatggccacaagcccaaaaccaggttagccactatcccaaagcagaatacaagtcctttaaagacaaagcccaagccctccaatacttaaataatggcttggaaaatgccaaagaaactagtcagggcctccaagcctacgtcgacggatccttcgataaaaagcaaaaaaactacagctatggtgttgtcctcctagaagatggcaagcttgtagccaagttagccaacagtgacaatgatcctaggtatgcggccagctatcaaatcgctggcgagtgctatggttgcctcaatgccatcaaatgggccattaaccattcctataaccatatcaccattttttatgactatatggggattgaaaaatgggctaaaaaagaatggcaggctaagaaagttatctcccaggactatgttcgcttttacgaccgctttgcccaaaatattgaggttgactttgtcaaggtcaaggcccactctggcgtctccatgaatgaacttgccgaccaattggctaaagacgccttgaaacaataaaaagcccaagctagcttgaacccagcttgggcttttttagtctagagttgagaaacttgggccatatcttctgaggataagtcaaaatcaaagatatccaagttgagggcttggttgttcgggttatgggatttgggaatgaccacaatccccctttgaacttggtagcgtaggagaacctgggaccaagctttaccgtattttttgccaattttagctaaggcttgacgctggtctggactggacttcatgggaccccaggcggttgggacgatcttttggccttgtaagtagtcaattaagtcttggttcttctcttccaggttaatttgaatttggttgactgctggcataattttggcataggacttcaagtcttcgatttgctgggctgaaaagttagacaccccaatatttttgagcttgccttggtcataataatcttctaaaacctgccagatccgcttggtgactgatgggttcgagctgggtttgtggatcaagtacaagtctagatagtcggtgccaaaacgagccagggaccggtcgatggtctggcggatgctttcttctgaatgggtatagctttcgtcattaggaattttagtcgtcacaaataagtcttgtcggtcaacgttactacgtgccagggtagcgccaacgcctgcctcattacggtagacaatagccgtgtcgactaagcggtaaccgagcctcagggcactttccaagggtgcaaagtcgccgtttaattccccattatagtcctggtcaactttgccatatgtgttggtccctgtccctaaaagtggcatggtctgaccattatttaaattaatccactccattagtcttcctccacttcactggtcaaggctaaagcaagtttttgggcttcatccttggtcaaagttattcctttagacatcttggcatggtcgggtgaccaagaccggatgtcatacttaggagcctggccgttccaagaaaccaggttaacttccttcttccagcccttactggattcggttaaaactgcgatatggcgggtgatctctactttgatatccaaggctatccctccttattagcttatctagtcaggtttattttaccatacttaaataaagagacaaaaatgattattctctcatctatattgaattaagctagggcacaacctataatataagagcaaatttaatggggaggttcttatcgtggcaagccgggaagaaagagtcaagttatccgaacggggggcatgggtgtccattattgtctacatcatcctagccctggtcaaggctggatcagggctcatttttaattcagctacccttttggctgatggcctcaacaattttaccgataccatctctagcattgccgtcttaattggattaaaaacagccaggaaaccggcagacgacgaccacccttatggtcactggaaggccgagccaatcgctagtttggtcacctcctttattatgcttttcttgagcctacaacttcttatctctgccatcaccagcttaatccggcaagaagttaaccagcctccttcaaacctggctgccatcatttccttattggccatgctggttttgttggctgttgcaggctacaaccgtaaaatagccatagagtcttccagttttggcttagaagctgtaagtaaggacaacctaaatgatgctttgacctccctagctaccgccttggccatctttacttcgtcgctcaatttagcctggttggaccaggtcatggccattgtcattgccctcattatcttaaagacaggaattggtgtctttaaacagtcctccttcgccctgtcagatggctttgatgactcgctcctccaggcctaccatgaccggattagtcagctagaggaagtccaagccatcccccaattaaaggcccggatgtacggagccaatatttatgtagattgtaccatcttggtccaggcccagatgaccgtccaagaaagtcatgatatcacagaagtcatcgaaaaaattctctatgaggaatttgatgtgatgcataccgatgtccacgtggaaccccacaatatccaggatcaattttccgatgaacaaatgtaaaaaaagaccaggctcaaaagctaactcgtcagcccttgagcctggttttaattgttttattgatcgtttagcttgaccactgtccgacccaagtgtttgccttcttttaaggcggtgatggtctggtctaggtctttcaatgggacttcagaggtcactaattggtctgctacattccattcttgagctaacttctgccaaatcttggccttggcctctagcggatagctgaccgagttaatccccaagacattgacccctcttaagataaagggcaggacggaagcttccatcttagccccaccagcattcccgcacatggacatagcgccattgtggtctatttgagctagggctttgcttgcaacatctccacctaccgtgtctaaaacatattggaagtttcggctgtctaaagtcgaccgacctgctgccaagtcttgagcctggacaataaaattggctcctaatttttgggctacttccacctggtaatctttacgaaccaaggcatggagcttagtgtaacccaagtggcttagaattttgagggctacgctccccactccacctgtggcaccagtgattaaaatattgggatcttcctcaagagacaaaccgtggtcttctagggcctggatagacagggcagcagtaaagccagctgtgccaaaggtcatggcatcctttggactgagcccctccggcagacgggtcaagtggtcagcatctgttcggacatattgggcaaagccccctgttttggaaacccccaagtcggtggagattaccataacgttttctccaggcttgaagtgctcatcttgagattccaccacctgccccaccaggtcaatacctggaatcatgggatagtcgcggaccaccccacccttggcctgggtggcaagcatgtccttgtagttaactgtcgaataatctactttgatagtaataggtccttgggtcaagtcatctaaagttaaatcttcaatttggtaagtcacctggtcgtcttcctggcgaacaataagtcctttaaagggatccatgctcttcactccttttaaacgtttacactttccttcaagtttattctagcatagatcagctatacttataaaacgggcgaaatggcaaatgaaaaaaggcaaggctaaactaaaactaggccttaccttggtctttcaactgtcctaaacaataaattaataaggcaatactcaagcctgtcaccaccagcaaggtcaaaatagccacttcatatgattgagtgaagtcataaacatagccaatggccgaaatcgaaaaggcacctgacaaaccagtcaaaagagagataaagggatagatacggtttgcctgggatttcccaaaaaattgattggtcaaaagtggcaaggccaaaggagggacaaagtaacaaattccatacaggaaggctccaaccagcaagagacccgtatgctggctggtcagtaaaatcccataggcgaagaccaggactaaggctgaataaatagttgttttggtggggccaattttattagccaaggggcccaggatgagtttgaaaataatattagccaacatggctgccgacagtaaactagccccaaattccaagttgaaacccttcgacaaggcaaagcctggtaggttttgggaaagtccggttgacaaggggtagaacaaggcaataaagaccagggacaggaagagagggctggtatagttaaaggactggttaggggtcaattccaatggtctttcccccaccaagtcgcggtctggcaaacttgtctcgccataagccaataagccttcatctcttggattgagccggactcccattaataagatcggtaggttaaagaaaataaagaggccgccagttatcacagcggaggtccgccagccaaactggctaatacaccaggtcataaccggtgataaaataaccccgaccaggccggcgaaggaggttgcgatgctgagggctaggccatttttttcttcaaaccaattgttaatgagtagagtaaaagggaccaccgaaatcaagccagatccaatcccccgcaagacacccaaaagattaaataaaaaggggcttgagaccagtgaaatactggcaatcgataaaccggctaagatcgctccaaaaaccgccatttgtctaaagcgaaaccatgacaaaatgcggtggacaaaagtcccaattatagctaagaaaatggcagccatagtggtttgaaaggcaactgttccgacatacaagcctaaatcgtctgcaatgggttggtaaaagacgcccatggcattcatgttaatccccaaagaagaagccgccattccacaagccgccagtaaaaccagccagtgttttcttgtcctattttccaagtgatccctcctaaaatcgtgacacatcattaaatcaatcatagcctagcctctatgagatgtcaattagaactattttggtcatctcattggccggatttagggctagagcagacaatattcttgcattctccccaaccatcctctataattgttacgttaaaacactatgcaagaagaaaggattcgatatgagtttagaaattagaaagtacaaggagtctgactttgactcagttcaccgatttattacaaacacctggtatgccgatgctgcaaaggaagatcctgcagtcgcccatgcttttgtaacggttgatgttaactcacatctccacaatagctcttttggtttgacggcagaattagatggcgaagtcgttggggttttctttggctttgtggttgaccatcccaaagaaatgcgcctctttgaacgcgacatcgtacctgaattacagaaattttttgagacagatacagaactcagcgagaacttaatcaagtcgataaacgaagaacaccaggccaatgaccaattaaacgaaaatttaaaagacccttaccaaggtcaaatccaattatttattgtcgacagcagtaagcgtgggcaaaatgtagggggtaccctgtggaatgctggccagaaaatctttgaagaagcaggtgtggaacgctttatcctccataccgacaccgattgtgactacggctactacgatgcaaaaggcctagactcccttgacccggtcgttatcactgatgacgagggcaatgaatcaattgattacatgctctaccacggcgaagttgaaaaagaagacgaataaagttgaacaaggaacaggtcctggccatcattggttcaggacctgttgctgtaacagataatggtggcaagggacaaaaagctggtttcctgatattttcctttctttccccttttttgacaaaaaaataattcaaaaggctaacaatcaatggtaaaatagaaaggaatttcgtattttaaccgtgaagagggagtgtttttttgaacaatattgaacaagttaaggacctcgagcaaattgtagtactcgactacggtagtcaatacaaccaacttatcaccagacgaatccgtgaatttggggtttatactgaactcctttcccacaaggtaactgctgaagagttaaaggaacgcaatatcaaaggcatcattttatctgggggaccaatgtcagtctttgaccaaaattccttcgcattagacccagaaattctagatttaggtgtcccaatccttggcgtctgctacggcatgcaactcttagcccagcactttgggggtaaggttgaagcttccaacaaaagagaatatgggggagccctcatttctcaaaccgaccaaaacggacaactcttccaagggctcgaccaggaagaagaagtttggatgagccatggtgacctagtcaaggaagtccctgatggcttccaagtcactgcccaaaacccccactgtccgattgcagccatgcaagacctgagtcgaaatatccatgctgtccagttccaccccgaagtgggccacaccaagcacggcaaggacatgctcaaacaatttacctttgacatttgtggctgttctggtaactgggacatgggtaaatttatcgacctagccatccaagagatcaaggatacagttggcgagaaaaaagtcctcctagccttgtctggcggggttgactcttcagtaaccggtgtcttattaaatgaagctatcggcgaccaactcacttgtatcttcgtggaccatggtctcctccgcaaaaatgaaggtgaccaagtcatggacagcttggtgggcaaatttggcttgaatatcatccgggtcaatgcccaagatcaattcctgtccaaactcgcgggtgtcacagatccagaacagaaacggaaaatcatcggtaatgaatttattgaagtctttaatgccgaagccgaaaaattagagggcattgaatttcttgcccaaggtactctctacaccgacattatcgaaagtggcacggaaacggcccaaaccatcaagtcccaccacaatgtaggtggtctccctgaagacctgcaatttgaactcattgaacccatgaaagctctcttcaaggatgaagtccgagctctgggtgaagagttgggcatgccagaatctctggtctggcgtcaacccttccctggcccaggacttgctatccgggtcctcggtgaagtgaccgaagacaagctcaaaattgtcagagaaagtgatgctatcttaagagaagaaattgccaaagctggcttagaccgggatatttggcagtacttcaccatcctgcctggcatgaaatcagtcggtgtcatgggcgacaaccggacttatgactacaccattggcatccgggcagttaattctgtagacgggatgacagctgattgggccaagattccttttgatgtcttggacaccattagtcgccggatagttaatgaaaccgaccacatcaaccgggtcgtttacgacatcacctctaagccacctgcaacagttgagtgggaataagacgatagctaagaagtccaaggacttcttagcttttttattggcctgtgagtacggcaatagacatggtataatggctaacgataacctttgaaagggggggcttatggataaagaagaaataaaggcaagcattgctgaaataatttatcaagcttttaaagacaagatcaaatatttttggttttggactgataacaagaccaaggccttagatttgatccaaaagggactagatctcagccaggtttgcaccttgacgaatgaccaaggccagatagtggcttgtgcgaccatagaaacagctaacagtggactggccattgacctttcctacaaagattttaggaaaagcttcaaccccctaaccggcctggtccggcaaattgtctataccatttacaagggagctcaaaaaacggcccaagaagatgaagtttatgtcgacctggctgcagttagccctgccttccggagccagggttatggtggtcagctctttgaaaaactagaaaccctgtgccaagaaaagcaaaaaaacaagttatccttagatgtggtggactctaaccaggctgctaagtccttttatgagcgaataggctttgagcaagtcggctacgagcaaatgaacatcttgttcagacaattcaccaaaaaagctggctttgccggggtatacaccatgaccaaaaaagttaaataagataaaaaccaagccaacaatcggcttggttttttagctattaaaattggtctttcttctcacgtaagtttttaaaagtttccaggtcttctgcttggaggaaaacattgacttgtttttcaaaggccaggcttgagggcagggtagcttctcccctagcccgtttttctcgaacttcctccaaggccttagagatgaccgaattgtctgcttgcacactatgggcaaaggctaaattgctttcggtgtactcatggccggcatagacctggacactgtcttccattgtcttaaatagctgcaaggcgtcaaactgggcttggtagtctccggtaaagacccggccacaaccgcctgagaaaagggcatcgccacaaaagagtcgctcgccggacaggtaggaaatatggcccggagtatggccggccgttaggtaaactgtaaatgagtcgcccaagaggttaaattggtccccatcttggacggtctgactattgtaggaccccgtttcttggggaccatagactggagtgtttgggttttcttcaattagctggtccacacctgccacatgatcttggtggtcatgggtgagcaagatggcagctaactttttaccacttgtttctagataatccaagaccgggtctgcttgccctgggtcaaccacaagggcctggtcgccaacttcgaccacccaaatgtaattatcttcaaatgcttctagtctcttgactggcataagaccttcctccccttctatattttccgtcttcactcattataacatttttttagacagacccagcttgtttaaacgacagcgggctaaaatgtagagtaaaatacccttgaccacactagagagggtcatggcccaccaaactccagccggtcccaaacttggcatcaaaatcaaagacaagggaatccggctaatgttcaaaagagtgttaatcaaagccgggagccgagtctctcccagaccgtttaaaaagcctgttgacccaatttcaatgctcataaaaaactgactcaggcctaaaataaacaagtaactagcccccaaggcaatggcctccatgtcaccagggacaaaaagtttgtacaagtggttgcgaaaagtaatcaaaattaccgtagccaaaatcccaattgttccaactgatttcatactggtgtggaagatctcttccattcttgaggacaagcctgccccgtaattctgtcccgaaaaagcagtaatggcgttagcaaaaccttccgtggtcacccaggaaatggactctatattagacccgatggaagtaactgctagggcaatagccccgtaaaccgacacatagcggtttaagataatactaatggaagcgtggaaggctgactggagggcagctggtaggcctaatttaaaggtgtcagcaaatatccccttgcggtaagtaaagcttaaaagtttactgtggtagaccaagtcctgacttttaacgataacaaagataaaacagaatagaataatgacctgggctgaaacagtcgctagagccgcccccctaatccccagttctggaaagggacccaggccaaaaatcaagaggggatctcctataatattagtcaccaaaccaatggcattaatccgaaagggtgtccgggaattccctagactgttataggccccagacaagacggggttaatgaagaaaatcggcatacccatagcaataataaccaggtagtcctccgccagggcattgaccggcccttccaagcggtaaaattgaatcagggggtcccgaaagaaataaaggaaaagcccgtagaggatccccataatgaggcccatccaaaccccattgttgatagccagcttaacccggttccgatcccttctcccgtaaaactgggctgttaagatagagagtcctattcttggcaccatcacaaaagaggaagccagccaaagtaaaaccccccctaccccagccgcagcgacagcttcagtagaaatccgaccgatccaagccatgtccgtcaaactatagaagagttggataaaggcagtccccattaaaggagctgctaaccgtaacatggtgggtaaaattttcccttccaataagtctagttctttcaccaaatccccccttacttaagctaaaggttagcagtttttaagggctttagcaagaaagaaaaaaataaaactggcaggaccattgagtatttaatcacaaggatggtcctgccagaaggttaactatcatttttatttagtcttgaaccatatcttcccggttggtaatcttgtaatttttaaaggcccaagatccgactataccgacaacagccccgataataagacccaagacactgtataaaacaacttgtcctggtgggttccaagcaaaggcggctataatacctggaacaacagatgcagtccctggggtattgttaattaaaccggccaaggaaatcataatcccgatcaatcccccactgatcatattaatggtataaatcgggatagggttagctgagaccaagtcagcagctgtcaagggttcaacagtaacagcaatcgcatcggattggtctccaatttttagccgtctaaagataaggtagttacaagcagctgtcccaaagatggacaaacctgcaatggccatgggtccccccgtcatattgatcatggctgacacagccatagaagaaatcggtgcggtggaaacaactgtcaatagacctccgattaagaagcccatgataatcggtgaagtttcagctgctatgttgatggtttcaccaatttgcatcatgaggccatcgattggaccagaagaccacatgctgaaagcataggttaaaacaggaccaatgaacaagatgacaatcatgtcaaaaccacccggtattttacgttccaacaaacggatcaaaaaagctataaggtaaccagctataaagccaggcaagatggactggccatagagaggaagcgaaaccataaaagcgtaaacaggcgaaaccccaagtgccatggcagtcaaacctgccgccgctgcacctgacgattcgccagcaatattcccgatttgggccaaccatccgacatcaaaaatttcaccgaacaaggctgaaaaaacggcttcgactaaaaatgttgcaactgctgcatctgctagggctcccattgcctttgaaccatccggcgcataaaatgtaaatagtgaaaacgctgccaaaaataagagcaataagccacttccaataagaacttccaatttgcttcacctttctagtaatatatagtatattgtgtcacagctttgtctgtttttcacaagtatagtataacatactagaaagcgtttactagtaataaaatgcttataaaatattaaattaacaaagatggaagggtttaccttctgtcaggctttttatttgtgaaagcccttcctttggtcgcggtcttgccaccctttcacaatgattcttagctttgggaatagcctatctttcccattcggtatactttttccggttccccttacttttactaattgggtatttttgtgcgtttttagctaatttatcgctgatgatttcatcaatgtctaagtctaaattatccgcaaacattagggcataaatgaggacatcagctaactcttctttgatgtgtgttaaattttgatcaatagcttcctggctggactgccactggaaaatctctagcaattccgaagcttctaaggaaattgagatggcaaggtctttttcattatggaactggcgccagtctctttcatcccgaaattgattaaccttatcagtcaaatgatccactttattgcctcctcttgagtctagagtcaatcttcttaaagatggcccgcatggcgagttagtagccctaacccgtcatgcctctggtcactataccatctatgtcagagacccagggatagttgatcagtattttcggatcaatattatccaaatttaactagcaatttatcaaatcccttactccattgtatcaaatatgtggactaactagaccagaaaacttagcctatttaaaagaattttgacaaaatggtttattggtaagacttagtgtagcgctaacagttaagattggtataggtcataatttatatttataataagttccaagttacttctcttgtcactgatccatcaagtggtataattgacttactaatcataaggaggaaaaattatggcttacaagacaatttatccttatacaaatgaagttctcaaaagctatgatgatacgactgaccaggaaatcgaaacagctcttgaccaaggtcacgccctttacaagaagtggcgccaagaagaccaattgcaagagcgaaaacaacacctactcaaactatcccaaatccttttggacaatgtggaccattacgctgaagttctcaccaaggacatgggtaaactcttgtccgaagccaaggatgaggtcaaattaaccgctaaaattgcccactactatgccgaaaaagcagaagacttcttgcagcctaccccactggaaaccaatgcgggagatgcctactatcttaaacaagcaaccggtattatcatggcagttgagccttggaacttcccttattaccaagttatccgggtctttgcccctaactacatggttgggaaccccatgatcttaaaacacgcttccatctgccctggttctgcccaagcttttgaagacttaaccaaggaagcaggtatcccagaaggtggctttaccaatatctttgcaagctatgaccaggtcaatgagattattgcggatgaccgagtttcaggggtctgcttaactgggtcggaacgcggtggttctgaagttgcccaacaagctggtaaagagctgaaaaaatcgacccttgagttaggtgggaatgaccccttcatcgtcctagaagatgctgactggggcaaggttgaagacttacttccctctgcccgcttgtccaatgctggtcaagtttgtacctcttccaaacgctttatcgttttagaaaaagattatgacaaatttatcgacctcttgcagaaaagctttgaagatgtcgtttggggcgacccaatggatgaaaaaacgaccctggctcccctctcatctgccaaagccaaagaagacgttcttgaccaaatcaaaacagcagtggaccacggggctaaagtcgtttatggcaatgaaagcatcgaccaccccggaaactttgtccagcaaaccatcctaaccgatatcgacaaggacaaccccatttacaaccaagaaatattcggtccggttgccattgtccacaaggttaaagacgaagcggaagctattgagctggccaatgactcttcatatggtttagggaacaccattatgagtgaagataccgaccatgccaaagaagtggctagccagattgaaaccggcatgtcctttatcaactcttcttgggtttcactaccagaactcccattcggtggagtgaaaaactcaggctacggccgggaactctccgaacttggctttgatgcctttgtcaacgaacacttggttttagtcgctaactaagtttcgctagggtttaatagtgtaaaatcaaattaactgccaataactagcccaccctttccagaccaaaaagggtgggctatctttttatcaaaaatggaccctgttaccagtcaccagggtccattttaagattcatttttaaaacttgacttctagataaatcggggtgtgatcttggcggggacctgagtcgaccatttcggatttttctacctggtcacttaaacggtcactggtgaggaagtagtcaattctccagcctgaattgttttccttacttgtcttgacccgctgcgcccaccaggaataaacaccctcaacgtctccattgacatggcggaagctgtcggtaaagccccggctaagcaagtgactaaagccttcccgttcttcatctgtaaaaccagccgagtagtggttgttctctgggtgggccaggtcaatttctcggtgggccacattaaagtccccagccgcaataactggtttgtcagcatccaagccagccaggtagttagcatattgcttgtcccactcttgacgttcaccgagccgggctaattgcgatccagcattaggggtgtagacttgggtaaagtagaagttgtcgaattccagggtaatcatccggccttcactgtccatgggctccggagcatcaatccttgggtaggttacttcaggactaaggtcttttttgtagaagaccatattaccggcataaccttttctggctggttcaaccgaactaacccaggcatagtcatagtttggaaaccattcttctagacgcttggcgtgctttttcgtcggtcccttagcagacagcttggtctcttgaatggccaggacatccggttggtagtcctggatagtttctaaaacctggcgggacatttgggccctgttggaatcactggttaaggcagcgttcagggaatcaatattccaagaaataaatttcatgcatgcaaaactcctcgtctttttctccagtttaccacaagtgaggggaagacttcacataaggggcaaaaaagattgtcctaactgagactaagccggtctggcaaagctaaaatctcttctttgctaatgaaaggcatcaactttccttaaggctgctaagacaagtacgccaataatagctcctaccagggcagagggaaggaagaaagggatatagtagccggcattaggcaggtccaagccataaataaatttcatcggaaaataatagacaaaggctgagagaatgcccgaccccaccacttcacttaatccagtccataagatatttttagtgtgcttatagaccaagcctgacaaaagggctcctacccatcctgaagttgcaatgaatgctctcccagacaaggccatccggaagaggccagaaacaaaggcagcaatggcattataaactggacctaggaccatggccccgacaacattcatcatgtgttgggctggggccatattggggaagacaatcactgtggacaagacaaaggacaaggcgataaaaatagccagacgactgagtttcttagtagtcatttttaccgcttctagctaaataaccatggtctagtggacccctgccctgacccaggtcgagattttgttggatggctccggtgatgtagtccttagcattttggacactggtagataagtcatgtcccttggcgaggttagcggcaatggcagaagacaaggtacagccactgccatggacattggggttgtcaattcgttggccatggaaagtttccacctgaccttggtaggctaagatgtcatctgcttcctggtcctttaagtcgccactcttggctaggactgctgtttggaacttgtctgaaatgtcgcgtgcagcttcttccagatcttttaaggtcttaatttccttgccggagatttgcccgctttcatagacattgggtgtcaggacggtagccaagcggaagagagcatcatagctagaagcatcatcggatttaaacaagttagatcccgaagtcgctaccataacgggatccaagacaatattttcggctttatattcttttagtttcgccacaatcgcatcgatagcggcactattgcctaccataccaattttgacagcatcggggcggatatcttggaaaattgagtccaactgggctgccaaaaggtcttcacttaagacttccacctcttggacgccctgggtattttgtgcggtgattgaggtgatagcagacatgccataaacatcttgggccaggaaggttttcaagtcagcttggatgcctgcacctcctgaagagtcagatcctgctatggttagagctttcttcattataatcctccgttcattttttcgcattttgccaagttgtaatgagttctcgggctgcctggccggggtcatgagccccagcaatagctgacacgacaaagtagccagccaccccagtttgtttgaggtcggccaggtctttggccttgaccccgcccccaacgacaaccgggatggggctgatatccgccagggtcttcaattcatctaggtttcggagctgaatggggcctttttgtcctttgtcataaccagcatccggcttggttgctgtctcatgcaaggggcctgccccaaagtaatcaatgtctttggtgtccgtttgcttgacgtaatcgatcaattggtgggtagctgctgataagccaacaatgctgttaggtcccaggtacttacggcagaccgacaccggtatatcgtcttgacccacatggatgccgtcaaccttgtagcctaagtcgcggcaggctaaaacaatatccaaacggtcattgacaagcaagctaacctcttcttccttgcccattttttggatcaggtcagccgtcttgttggtcaggtcaataatatccttagcctccccttccttgtcccggatttggatcatagtcatgccggcttcaatggccgcttcaatcacctggagggggtcccggcccagggtgttttgtggcccaacaataaagtagtgggtcaagtggtcaggattaaagtcagtcatttaagtcatcctcctcataattggcttccaatttgccttctttggaaaggctataaagcaagtctaagaacgctgtttggaaagatgccggttcttgggctgactgggcagctgcttgactggcctggttaaacaaagtgcaagctgtaagggctgctgttaggggttgagctactcccaggtaaactgccatcacaccagccagcatgcaaccagctccagtgatctgccccattaaggctgacccgcccttgagcgaatagtgatggttaccatcagtcacaaaatctttcgggcctgagatgactaccacctgctttgtaaagcgggctagcttgacagccagtgacttggcagcttggacactatccttactgtcaaccccgataaaggtttggtctgcctggtctttaagcccccaagcagaagctaacttaataatttcagtcgcattgcccttaatgatggtcggcgggtagtccttgataaaggaaatcaacttctggtgtatccttcccttgccaataccgactgggtcaagtaaccaaggcttaccggcttggtcaagggccttgatggtagctggcaccgccgtctcatggtccttgatgagtgtacccaggttaatgtagagggcgtcacactctggtgcaaaactctctccttcttctgcctggtaaaagactgctggtgacccgcccactcctatctgagcgttaacaacaggatttacagtgacaatattagtgatactaggaacaaaaggaccatggtctcttgcctctgccacagtcttttgcatttgatctagcactggatcactcctcatacatattatggggctaaggctcactttatttcatttgaacgaaaaaagggcagactcatgctaggcctgcccttatccaagataaagatattttactaaacatatccctgcgtcagcattacctacttcaggttcaatgagtcaatctcagcctttaacggcgccccacatgtttatattattatattttctaaacttatggtaacggtttaatgcttccctgtcaatgcttactattcttggtctacttttacctagtaggagcaggtgaaacaaaagcggaataagccggccaggtaggatgactttttttaccctattgcaagcttttatgacaagtcaatccaataccggttaacccgtttgcctgaccttgctttcacttggttttccagtcttccaccattagccttgacgacccttatactggccatattgtcaggattgactgtcagtaagactgaagttagtccgatagccctagcctggcctaagcaaagggagaggatctttttgccataaccccttccccggtatgaaggactaatgctgtagccgatatgaccgccatcatacagcaatccctcatttaatcggtggcgaaggttagtaatccccaccatttcccggtggttcaaaagaagatagctggaagccggtaccatgcctttcggaacagtagcttctgttttacattgttggacaaagtgataccagtctttgaaggtgtttgcttcttttaaaccaaagccaccatgaatagggcctggcccaaaggaatcccgaaaagttatgacttgttgttggaatatgggtgtcacttccaccaaatggagggcgtctttgtttacctgcatttaaaccacctcttcatggttcaaccaccgcttgattaaaaaagtggtctggtctttaaagttagggccaatggtcatatggtcagcctccccagacaggtagacagtagcctgactgccatatttttcgccaattgccctggcaatagccggcactgtcaacttgtcgtgttggccgacaataataaggacgggacagcttaccttcttatagtcaatggctgttgtctcttctgcatctaaaaagggtaaagcgacttgggtatacgccttgcctgagtctggaacaaaatggtctaaggctgcttcaacatgttggaagtcatgttggtcatgagccaaacgaaccgcatgcttatatggtggaatggccttgcgccaaaagccccagcgtaaaaaatgaggcaagaaggctagcaccatagaagggtaaaaggcgaagatatctgcattgggagccggccccagtaagatgaggccggccaagtcagtcttttgagctaccatttggaccaccaaacaacccaaggaatgaccaactaaaatggggggttgggggcaattttccaccagtttttgaacctggtcagcataagcttgtaagctcaagtccttaaccatctcacctgcttctttatagggcaggtcatggtggagcaggttgagggctaatatatcaaagccaagccctgccaagtcatcttgaatatactgccaatcttgactggttccccaagtgccatgtactaaaatcattcgattcttcatgctttctcctttatccgatttactcaaatacctgcaaaagaatacccttaatgtaaaagaggggaagtcagaagtcaagtcataatggctagaatgagcataaaagctagcactcttttcaaagagtgctagcttttatggcacttggatcatgaatggaaaatacctatcaccctaaaaaatatttactggccattaacatcttcaattcctatgccagtcggtgcccagatatagttaagggtttcttcgggatcgataccctcttctagaacgcccaattcgatatagtcatcaataatttctttaatagtatcctctaattgttgttcagatgccttatagtttaaagaatcaataaattcaaaaccatcttgttgatcaccagataataagtcgtggtcataaagaaactctacataacttcctgtatcttcttcagcccaatcattggccttatagatgcccgtaacaatttttagtgataactggattttcttggataaagggtttatgaacaaaaattgcgcaacaaacttcatctttaaaagcttcatcagtggtaattgaattaatctctttcaaagacccatcttcaacgattggggcagcacagttttctgtgtaaatcgccccatctaactcaccacttttgatcgcttctgtggttgctgctacgtctgaagtagtaaattgaacagattcagggtcagccccttcttcttggagaaagcgtaaagcaatattgtggtcagactcgcccatgccaccatggataccgatagtcatctcatccatctctccagctgattcaagatctgaatcacctgccacataaagtcccttgcatcctgtattcatcagtccaaggtattgggcatcaacaccattaataattggaatcaaactactggtaatatgtccagcacctaagacaacttgaccagtcccgacagcattaattgtctcattttgactttgcactagttcaacgtccaaaccttcttcttcgaaatatcctttttccttagccacattgatgggagcagtacaaccattaaggcttggatttttgatacaacttgataaattactagctaatttgggctaggacacgggcaatccggtcctggtcgccttcaagcagagtccggacatcaacttggaccttgccatcagcaattcgggcaatgatatggtcttgagacaagcggagggcccgttccaattggctctccgtcatagtttggtggcttatttccaccaagctggtagctagtttagcttccgggtaggcaccgccaccaacttgagactggccagggactacttcaacagtataagggccatttatcccttcaattttttctttcaaggcctctgcctttgcttgtaactggtcagggctctggcttaaaagctggaggctaggaatggtttcaaaggcttgctgaggcttgcggtaggcctgtagagtcatttctaaagcagctatagtgaacttatccaccctcagggctcttaagagggggtggccttttaattgtttaatgtacttggccttgcccagcaaaatacccgcttgggggccacccaagagtttgtccccgctaaaggtcacgacatcgtaacccgcctggatgctttcttgaacagttggctcgtacggcaagcctaaaggttgcaggtcaagcaagagaccagaccccaagtcgttaaaaatgggtaattgcttgcggtgagccaagtcaactaaatcttggtcactgggcgcctcagaaaatccgataacccggtagttactggtgtggacttttaaaatagccccggtctcttccccgatagcagcttcataatcttttaggtgggtcttgttggtcgctccgacttcttttaaacgggcccccacactagaaataatatctggaatcctaaaggagcccccaatttccacgagttgaccccgggaaaccaaaacttcctgatttgaaaggagggcagtgagcagcaaaagaacacccgctgcattattgttaacaactaaagccgcctcagccccggtcagttcacaaaggaggtcttcgacatggctgtagcgggagcctcttcgacctgcctgaagattgtactccaagttgctgtagctttcagctttggcctttaaactttctaaactaggcttgcttaaaatggcccggcctaaattggtatggagcactgtccctgtggcattgacaacccggtcaaaggataaagaagcccggtcagttaattcttcatccactaagcgaataacccggtctagggacaaggatggtgactggccgtccagaatggcctggcgaagagagtctagaacttggttgcagactgccttgatcaagtcttcagtaaaagtttcctgccatttttgaatggcctcatctgctagtaagtcatccattttagggagttgccggagttggtctttcatttttattcacctactttgccaaaattcgtttgtctcctaggcgcttggtcacaccctgattgtccaatgtctctaagaaagaaacagcatacttacgagaagtgccaagcaagtcgcggaagtcggccagggtaatggacccgtctgccttaatttttttaatagctacttctttcccagcctggtaagtatcttggtggaggtagacctccttgtcaatccggaccagttcatggtcaaccatagaccgcaagatttcttccttaacagggtcatcgcccaccacttctttggccttgggcggtttaaagccagcctctttgtaggttttttccatacccctcttgacctggtcttgttcttcagacaggcttgggtcaaagccggctacacgaaccgtattatcatcttggctaatgaccccctcttggtccatatgttttaagaggcggtctcggtctttatcctccacctgggccaagttcccccgtaattcttctaagggcatgccggaccggatagggtaagtctcatggtagtcttgcagtagttttacaacctggtcagtaaattggtccaataagctctctgatatatagcctgggccgaattggtagactttctggtcagccatcagttcttctaaggtttctttaagacgtttgtgttcgacatttaaatagttggcgatttctttttgactggtcaagccaaaggaccggttatcaaggaagtaaagggttaaagtagccaagtcgccagtctctttaacttcaaagcttttaataacctcatcgttaaaacggcggtgcttgtctggggcttcatctaaaactaccccgccagcaatagtatagaggggagagtaagaccgtaagacaaaccggtcacccttcttcaccgttacctcatcttctaaccgcaactgcaagtaaccttcctgaccaggttctatcctttcactgccaatcggaacaagccgggctaagacttcccggctccctagatagacatggacccggtcccaaagttccagggcatagggggaatggggtaggcaggtgacctttacatccaacatataactagccttaaggggaccagttgtcaggacatctccccgactgacctggtcaaggtcgaccttggctagatttaaggctgtccggttgccggcataagctgtctccacatctttcttatggatttgaatattctttattttcgtctggattttttggggatagagggtgatcgcatctcccaaatgaagcaccccttctttcaaggtgcctgtaacaaccgtcccaatacctttaaccgaaaaagcccggtcgacattcatccgggcaggtaggtcaaggcggttacttgtcacattttgacactggtgagttatttgctgtctcaggtcatctaaaccaatcccagacacagcatctgtttcgacaataggcgcttgggctaaaggggtgccgtcaaaacgatctttaatatcttcataaacaatctctttgagatcttcatccgccccatccaccttagtcaggacgatgataaagttctcaattcccagaagacttaaaatcgccgcatgctcgatggtttggggcataatcccttcattgacgtcaataaccaagaggaccaggtcaataccaggtgccccagccagcatattttttaaaaatttttcatggccaggaacatcgactatgcctacttcttcgccattgtccaagttcatataagcaaagcctaggttaatcgatagacctctgctatgctcctcttccatggtgtccgtttcgataccggttaaagctttgatcaaggttgtcttgccatggtctacatggccagctgtgcccacaaccaagttttctttatctgccaatgacgtggccctccttatcttactttaagacaagaccaagttaattgataatgatggtcttatcttctttttcaccaatcttaccaatgatttggccaaaaacctgctggtcttttaagtcagctaataagtcttgaacctggtcagagctaatactgattaacagaccgcctgaagtttgggggtcgtaaaggatttcttccatagccctgtcagaaaggttgaattgaacttcttcttccaagaaattccggtttttccgtgcgccaccggtcaccattcgtaggctagcagcctggtaggcttccttcatagctggaatttgactagcttccaagtgagcagtgaccttaccagccgtcatttctttcaagtggcccagcaagccaaaaccagtcacgtctgttgccgaagaaatctggtagccttgcataacttggccaacccccttgttaagggtagtcatccactgacaagcctggtcgtaagcctcctggctaatagcatcagccttatgtgctgttgtaatcagaccagttcccaaaggtttcgttaggatcaaagaatccccaacctgggccttgtcgttttcgataatcttgtctgggtgaaccaaaccagtcacggataaaccatacttagccgtatcatcgtggatggagtggcccccactcaagaccgcatccgcttcgtgaaccttgtctgctccaccttttaggatttgacctagcatgtcataatttccttggtcagggaaagtcacaatattaagggctgaaatcaccctacctcccatggcatagacatcacttaaggagttggctgctgcaatttggccaaacaagtaagggtctgacaccatagatgggaagaaatcgatagtctggattaaggctaaatcatccgttaagcggtaaacggaggcatcgtctgaagaatcatagcccactagtaagttatcatcttctttgatcggtagttgtttgagtatttcgctgaggtcgcccggacctattttagcatttcaaccaccacaagaagagagttgcatgttgtatttttcttcttctgccatcttgtccaccaccctttcagtgattttcacttcatttcattatctcataaataccaggcaaggtcacacagattaaacttttttaactcattttaaggcaattgagccaaattcctgaccaaactcccttttctaagctatagaaaatccaaataaaataacccagcccacctctcattaattagggagtgactaggttatttttttctctacttagtcaatatcttggccagtaatggttgcccctatccattgttttaacatgtccaaagatggtgccatgacttggccagccaaggcgtcacgcaagtagagttcaaagttgcggaagccggtataagcccgtcctccaccaatccgcatgcctaggttagcagattcggtcacattttcggtagccacaacccgggccgctaaaacttgagggaaggccgcattcaggtcttctcgggcagcctgagcggcttgtctggttagggcagttgctgcttgggcgttggagtagatagtggatatatgtcctttaatagcatcgacttcggacaatttgtggccatcaggatactggcggtcagtagtatgcataacagcttcgtccacgatagctgtgtttaaaccagaatagacggcagctagtccaaccaagaagatagtgtgggtctgtgggttatccaagcggtcggcttccgaaatggacacatcctccaagaacattgggcaagaaacattcccccgcatgcctaggccagaccaccattccattttaaaagtgacgccgtcagcatcttttgaaaccaagaaatgtttagggtcttcatcctcatctggtcctgtagcgttgaccacataatagtcggcaaaggttgcggaagtcaccatggacttggcaccacttaagatccaatggtccccatcttttttagctgaggttcggtctggttttgtaaattggactcccccagaagtttcggagtaagccaaaccaagaaacttaccttcttcaatcacttcttggatgattctttttctggtctcttcatgggccgttttaaggacaccatccagggccacattgtgcatcaagtaggtcaagcccactgtggcagatttctgggcaaaagtccaaatgatgtcaactaagtcaacaatatcccccccaatgccgccttcttcttgggggattaggagttgtaagtatctttcttcgtgaagtttttcaaagacttcttctggaaaagccttttcctcatctaatttttgagcaactggttcaatatatttattagcaaagtcactcgcctgatcaactaattctgtcatcccgtcattcctctcatactattttaatgaatattataacaggaatgagcccccgacccaatcatttgcccttgacaaggagggaaaagacctagatgttgggggaaaagccctactctgtggtcaaaagagcagggctttttggatcaggcaggctagataaaaaatacttaactctttaatccatctcttgacccgtcaaggtctctcctatccattcttgcagcatgtccaaggatggggccatgacttgactggcaagagcatctcttaaatagagctcaaagttcttgtagcccgtgtaagcccggccaccgccaatccgcatacccaggttagctgattcaataacattttcggttgccacaactcgggcagctaagatttggggaaaggcagcttcaaggtcatcccggcctgcctgggcagcttgcttggttaaagcagtcccagccatggctttggagtaaatagccgaaagatggcctttaatggcatctacctctgctagcttgtggccatctgggtactggcggtcctgggtgtggtcaatagcttcttgggcgatggccatattgagtcctgagtaaacagcagccagtcccgctagaaagacggcgtgggttttagggttttcaagccggtaagaatccgggacttggaccccatccataaacatcgggcaggagacattgccccgcatgccgaggccagaccaccattccattttaaagctgatcccgggaccatccttagcgacgatgaagtttttagggtcttctccctcttggtcatctttggcgataatgacgtaatagtcagcaaaagtggcagaagtcaccattgattttgccccgttgatggtccaagtgtctccttcttttttggcgacagtccggtcaggttttctcgtttctaccccgcctgaggtttcggaataggctaaggccaggaacttgccatcttccttgacctctttgacaatttgctgtttagtcttttctttggcagcctggaggacagcagctaaggctacattgtgcatcaagtaggttaagccgactgtggctgactctttggcaaaggcccaggtgacctcaactaggtctacaatatccccgccaagtccacctaagtcttctggcatcagtaattcaaggtatcgctcttcatggagcttggcaaaaatatcttgcggaaaggcagcttcttcatctaattcttgagccaccggttggatatagtgtttggcaaattcagtcgccttatctaagatttcagacacaccatcagtcctttcatttttcagttttgataacaaaaccagttcaaaaaaatagggtctatgtttctgtcccgcttggccttaaactagtttgatccattaacgttagtccaacagaaaagccctagcccagtcaatctttttttgaaccggcagggcttgtcgctagataataatttcgctacaaaataaagtggggttctatctcaatcggggaagattggttgaccaattggaagatggggttgtcaacttgacaatcccttgccatttgatctaactcatcttcatcgtcatcagcataatagtagattttgaccttgatattttgaatttgagccggctggtcataaccccggacaggaacaagtcgcaaagggttttggaggtctgcctcaataaccccttcaatttcatccaggtctattttcttttgtttcaagtggttttggaaggtccaaataactgacgacagaatgctccccatgaaataggacacagcagaatagccttcgtcttcaatgtcaaagctaaccactttgtcaacgtcgaaccgcttccgtccagtatagagtttgaccttgtccaaatcagggttggtcccccgcatatgaaggctgtagacttgagattcttttggtttatgactggtcataacgatctctcaattcttgcttgacttcacttaagacttggagcttgttttcgataaatgctaggctgttgaccggttttttggaaaaagtggcaaagccacaatctgggttcaagttaatccggtcagctggcaggtagtcaagagcccggtccacttgcttgataatcgtctccttgctttctgtttcatccttacgagggttcataacccccaagcctaaaatggtcttctcaccaaattggtggttggtgaacaaggaatcaatactcccggcccggtctgtcgaatattccaagtagagaatatctgggttagcatagtcaaacaagtctaacaagggggtgtaggggccttcaagtaaaatgctttcatctttggaccagttaccccggcaaacatggagggccacattgctttgactacggtcgatgccgtcaaaggttttcttgagcaagtccttggcaaatgcaagttcatcagttgggtcttttttctctgacaaggaggcacacataaaggtccgggtgtgctctggtgagaagacaacttcggtcaagactggctcatcaaattgaacggtgtccaccccaagcttctgcaagtcttttacttcatctgttaggcactggacaacgtcttcccccagttcttcttttgagtcatagaagttgtcagacaggcccttgagccacatggaccgggtgaccaagtaaggtccaggcagggtaattttaaccttgtggtcggtcatttcttttaacatttttaattctgatccaaccaaggacttgtcccggctgattttaccaaagcagatggcgtttttgatcacactgccaggaacgtctaaaatgcctagcatgtcttcataggcctgcttgtcctcaatatagtccagcatttctgtattgctcatcattttgacattgtttaaggaattggcaataaaagaaacgtaattgtccctggcaagttcacctgagacgatatagtccaggtcatacttttcttggagtcgaacaattttttcggtttcttggtaaaccaagtcctcatattcgtcttgttcgagacgatttttgctgaggtcacgctgggcttttaataaggttttagaccggggcatggagccaatcagtgagttggcaaaactttgaacagtcatcaacatctacccttctcttaatcaaaaaagtctaaatagtcgactgcttgacgtatttcttcatagttactggtccggcccggtatccattctttgaggccttctaagtctaggatttccttgtcctctggcttgtcgtagtccattttcttcaagactttcgtaaattgatcgattaggtctttgtcaaggcctggacgaccggtaaaaatacagtggtcaaaagatttcgtttggccaatcacttccaattggttttcatccaaagtcccatctttgagccaaccctcatagttgccagctatggcaaagccagctgcattttcacccgactgaacggactgcaaggcgtctttttcgccaccaacgtggtccccatccaaaccaaggcctaggtcaaaccgtacttcttcatagtccttgccgtaagccagaccttcttctcgcaagtattggatggggatcaagcgagcttgaggagagtcttgggcaccaaaggcgattttttgtcctttgaggtcggaaacacttttgatatcactatcttttctagttaccaaaacactgtgcaagtcacggtcagtgtcccgcatacaagcatggaccacttggccaccagacttcaactcagcctctaggttagccaagggagagttccaagctaggtcaacttcgccatccaagagtccttgaacctggttgcggtagttatcaaaaaagaccggttcaacttcaagcccttcaccatttgcttgaataaaatcaactattttctcccagacaacggttaccttgggatcataaacaactgcaccaacttttaagctatcagacattaatgaattcctcctattagatcattcggtcgattcattctctattgtactactggatcatatcttggtcggtcaaggcagccccaatccattggtagagcatgtccaaggatggtgccatgacttgtccagccaaggcgtctctcaagtaaagttcaaagtttttgtaacctgtataagctcggccaccaccgagccgcatacctaagttagctgattcattaacattttcagtggcaaccacccgggctgctaagattttaggaagggctgcttcaaggtcctctcgtccgtcataagctgcatccttggtcaccgctgcagcagaaacggcattactgtatatttttgaaatatggctcttgatggtgtctacttctgacaacttgtggccatccggatattgccggtccatagcatgactgatggcttcttgggcaatggccatattcaagccagaatagactgccgccaagccagcaaggaagagaggaacgatgtccgggtcttccaagcggtcttggtcattgacgaccacatcttttaagtccattgggcaggaaacattcccccgcatccccaaaccattccataattccattttaaagttgaccccatctgcatctttggcaacgaggaagttttcagcatcttcttcaccttcaatggttttagcaatcacaatataatagtcggcaaaggttgctgaagtaaccatggattttgacccgttaatagtccacttgtttccgtctttaacagcctgggtggtatctggtttgtaaaattctaccccgcctgtcggttcggagtaagctaaggctaggaacttgccatcttcaatgacttctttgataattttttgcttggtggcttcttctcctgactgaaccacggcatttaaggccacattgtgcatcatgtaggtcaagccaacagtagctgatttagccgaaaaagcccggataacttcagtgtggtcgacaatatccccaccttgtccgcccagttctttaggaatcagtaattctaagtacttttcttggtgaagcttgtcaaaaacctcttccggaaaagctttttctttatctaatttgtctgctaccggttcaatatattggctaccaaattggctggcctggtcaaatattttagtcactttatccatcctctcttgatttatttatacagtttaatgtgattaagcccaagcattgacttgcttggctaagtctacccttgactattccgccggctttcttcctttagaatagaatcgagggtttagacctaaatctttcatccatggttcggcaaggaaaaaattgaaacgaaagtttgccgaaaagctaacttttcagcctacttaagctgggaagacaactttaggactattagcaaacaggtccacaatcttaggcatggaagtaatggtgccaacttcaatcttatcatttaagtcataatagttgacacaggtcccacagctagcaatatcaacgcctctttcggctaagttaaagagatcatctaaggcttttgagcctgtagcagttaaaaaagccccatctccgtaaaaccacaagtggtctggtaggtccactttttcagttaaggtatggaggaaggtcagcatcaagttctctgtcaagtccttttcgccttcccccatggctttgcttgtcacaacaatatcataactcatttatattcctccttgtaattttcaaaatacagttttgctttaacctcatctattttctcacttgtcaagtgttttttaaagcattcagcttgtcgcctatttttgaaaatgagagaataagctagcaataaatcgcttgcaaggaacggttttattatcccactatcccctgtattagctaggtaaatgatagaatttttactgattctaatttaattttctttcaattgacaatggttttaaaatacggtcaattcccatcactttatcttgtagacaagttcactttgtagtataataggaacttgtctaaggggaatggatgggaaactggtgttccctctggtcttcaaaaccagtatgaggggttaggagctccttgggtgagttcgattctcacacattcccgccagtcaataaccactggaagcccagtgaagtgaaccgaaaaagaggcttgtcaagattgacaagcctcttttgtgtcgttgtctggattttgccgttttcaattttctactatatttgacaattgtcacctttcaactttgaaacttccttattttgatttattgtccactttcaactccaaaacttccttattctgttttattgtccagtttctacttcaaaacttccttattttgttttattgtccagtttcagctccaaaacttccttattttgttttattgtccagtttcaacttcaaaacttccttattctaatttattgtccagttttaacttcaaaacttccttattttgttttattgtccactttcaggataaagtccatataattgtgtaaaaagaaaaagtcataatgacctttttgagctacaatgtagttatagaaaaccaaaaaacacattgaaaggaagatcattatgactcaactcaatcttacactagacgccaataaattaacagacgcaattttaaattgtgatctggatcaagtgatgaaatccaccttagtgacggtcttaaatgcttatatggagtccgagcgcgaccaatatatgaaaagcaagcggtacgagcgagatgaagatcgctgtgattaccgcaatgggtattacgagcgagatttcaccacgaaaatcggcaccctcaagctcaacgtgcccagaacgcgatcaggcgacttccatacccaattatttgaactcaatcagcggatggatcaaggcctattggctaccatctttgagatgtacgtcaatggcatctccacccgcaaaatgacgaaagtcgtcgaatccctttgtggtcaaaaggtctccaaatcgtttgtctccgatgtcaataaacacctggacaaggatgtctttaactttcaaaagcggtccctcacccatactaatttccggtatatctatgtcgatgccatgtatataaaggtccgagaggataaccgggtggtgtccaaagccctttacatcgcccaaggagtcaatgatgagaataggcgagaaatcatcgggtttaaagtggctgggcaagagtcaacggaaagttggcggtcgttcttcctcgatttaaaagccagaggcattgatacgccgaaaatggtgatttcagatgcccatgcaggcttacggaaagctattcaagaatgttttgtcaacaccacttggcaacgctgtacctttcacttattaagcaatatcaccgatgccttgccgaaaaccacggaccgagtcatccgagatcgtttccaagcggttttattttccagaacccagcaggaagctcgtgaacggaaacaagctttggaggcggaattcgaagaccaagcgaagctggctaaagccttgagcctattggatgagggctttgaagatgccattcagtatcagatcgagccttctccttaccacatgtctttaagaacaaccaattccattgaacgagtcaaccgtgaaattcgacgtcgagaaagagtggtggggattttccccaatatcaaatccgcggaacggctagccggctcgatcttattaaacctgcaggagaattgggaagctcagaactatcgatttttacgataggttgaactttttaaaccccttttaaaacctgcctccctctggaaaaggggctttttccctcggtcacttggcgtaatctaacacaccgctggctcgcttcaagagaagcccactctttccgctcgccaaacggtgtgtttagccgatcacgccgaccgacggaaaaagaaaaagccccgtcgtataacatctgttactatattgtagaatttacacatagatttggacttgactctttcagctccaaaacttccttattttgatttattgtccagtttcaagtctcaataaagtaatttcccttttcgtagccataacctagctaagcttagggaaatacttttaaaacaacaagaagacccaagcgtgaagtcacgcttgggtctttcctctagtctatcccgttaaggaaatgattcatttaaaatagtagggtgtcactaccgaatgtgtagttatcaccaagggcttgcatggcgagaacattcaagtagttccatggtcgattgtattccggttggaagaagaaatcagctgtcgctaattgctctagggtccaaccagcagtcaaggcgatagacatggagttggctagtggcccaaccacatcatctttagccataaactgagcccctacaatacggtggctatctttaacatagtgaattttcatgcgaagggtgccaactggtttttcaccgttacccatgaaggatggcaagaggggttcttctacatacttgctttcgacttcttcttggatcaagttgaggttaatgtccttgatacctgttgaagcgaagtagtagtcaaatacccgcaagccggaagttccattgatggttggcgctttgtatttgtttccttcaatcatgtttttagctgcaatagctccaccgcgtctggcatttgtcgctaaaccaattctgattttttcaccagttggtccgtatggcagtttagtagcatctccagcggcataaatgttttcgtctgaagtctgcatgtagtcattgacgaccacactgccatcagggttcaagtccacgaccccgtctagccagtcggttgcagggtgcataccaacggcaaaaataacggtgtctgcttcatattcacccttgttggtgacaacacctctaacattaccatcttcgtcacctagaatttgctgaacagcctcagaagttttaatcttcaagccactatcgatggcatggctggttaaggtttcagtaaattctttatccaagtaggttgggatgatggtttccccgaattcaacgatagtggtatcaatattggcaagggaaatcgcttcaccaaactcaataccgatgtagccaccaccaataacgacaacttttttggcttcttccattctctgtttaatggcaccggtccagtctcttcctggggtgaagtaaatgtggtcatagtttaggccaggaatattcaagacatttggtgcagagcctggggaaataaagagtttgtcgtaagaatcttggtgctgtccgtctggtgtttcaactgtaatcgttttgccttctgggttaatgtcaacaacatcactatttaaatggacatggacaccttggcaggtgtatgagtcagcatttgcatagtggagagaatccaacgtcttagaaataccttctaagtaagattggctccctcaacccataaatgaagcagagtcacctttttcgtaaaggtggagttccgcatcgctttggtttttcaagtaagtctggataacttcgtgtccagcgtgtgaagaaccgacaactgcgattttcataaatcattcctcctattcattgataccctcattataagagcaaagtgggcaatattcaagcttccaacttagctggcaaatactccttataaaaaccggattgaatgaaatatccggtccgttaaatacagaacaaagtagtctcttcaaaccaccggaccccacaagtcctgcaagcggaaaatggtcatctatgtaaacttaatcccaagttgacttgcccaagccagttatccatggtaagttagtcttatagcaagccttttcactaggggtagtcattggacttgagaatgaccctttgaacctgatcgggttaagacccgcggagggaagtgagtggttaggtgggctttttgcctgccaaacacctactcctagtgtctcaacaagacttaggaggaataataatgactttcactgacgaattgaaagaaatgacacaagacacctgggaccggtctttaaaccacccatttgtaaagggagtcgctgacgggtccttgcccttggaaaaattcaagttctatatcttacaagacatttactatttaaaacattacggtaaagtccatgcctttgctgcagctcatgcggacgactttgacgtgacagctgacctggcccaaaaagcttctgaaacagcccagtcagagttaactgtccaccaagaacatgccgaaattttggatataaaaaaagaggaaatcgacaacttagatcctgccccaacggcctatgcctatacttctcacttgtaccgggcagccttgtccgggtctttaggcgaaatcgtcgctgccatcctcccttgctactggctatacgctgatattggcctacgctaccaggatgctagccctgaacctgacatctacaaaaactggattgccacttatgcaagcgactggtttcaagagtcgacccaagatatgattcagctaatgaatgatatcgccagccaagccagcgaggtcgaaaaaaacaagttcagacagcaatttaaaatagccaaggaatacgaacttggtttctgggaaatggcctacacctttgaagactggatttccaataagtaaaagctaaaacaaccctacaaattaagacttaaacgaccccagtttcaggggtcgtttttaaatctctaagcatcaaagcgtttaatatccttaattttgtctatgcccaactggtcgagtcggtcgggcaggccttcaattatttccttgcagaccgtggggtggaggtagttttctgacccaatttgaacggctgtggcacctgccatcagcatttcgatcacatcatcaatggtagacatgcccccaactccaactacagggatggaaacggcctgggccacctggtggaccatacggagggcaatgtgtttcaagctaccagcagacaagccaccggttacattacccaacttggcctggcgggtttcaatatcaatggctaagccggtcaccgtgttaatggctaccaaaccgtctgctccagacccttcagctgcctgggctaaggcagcaatgtcggtcacattaggggttagtttgacaaagactggcaggctggtcgctgccttcacttgccgggttaaatcagccaaaatattcggattggtcccaaaggctagccctccttcggcaacattggggcaggaagcattcacttcaatggccaccacattgggtgcttgggaaatttgctgggtgacctctacataatcctcaattgtcttgccggctacactggcgataatgggcaggtcatactgggccagggcaggtaatttttcggctaaaactgcttcaattcctgggttcttcaagccaactgcatttaaaatccccttgtctgtgtgggcaaatttagggtctggagctccttttctggcctccaaggtggtcgttttaatcaccaggcctccaaggatgcctaagtcatagtggtccatcaggggctccccatagtccactgtcccagaagcggggataatggggtttttcaaagtcaaaccggcaaggtcaatacttaagcggtcattgttttcttcagtcatgattttcctccctttcatagcgaacttggccagcgacaatggtcatctccaccaaaccatcaaaactttgtcctttaaagggcgtattgtccgacttggaggcaaagtcttgggcagtataagtcttgtttaggtcaataagggtcaagtcaccgtcgtagcccacttctagcaatcccttgttcaagcctagaattttagctggattgtggctcagcaatttcgataccaggcttaggtcctggccgtggtcctggactaaaaccttgtagataatgggaaaggctgtctctaagccaatcatgcctggtgacccttgggctttgtcttctgcactgtggggagcatggtcggtagcaatagcatccaccgtcccgtccaagattccttcaatcagggcctctacatctgccttggcccggattggtgggtggaccttaaagtctgagtcgtaaaggtagatatggtggggagttacttccatggtgaccgggtaacccttggccttgccgtagcggacggcatccaaggcatcgactgtcgacacatgacagaagtgaactgggttgcctatttttccggcaaagtagacatccctcaaggtatggacgtcttcagcgtagcggtagtcaatttcagacagttccttgtcttcttcatggatcataatgcctaagtttttttccttcagggcttggaacaattcaaaggtagccttgttgttaaagagaccaaagccatcatcagataaaaacttaaccgagtctggtatccggtcaaagtcgactcgttcttggccggccaggtccttggaggcagcataattttgaaagatatgaaccaagcctagttcctgggctcgggtcataatatcttggtaaacttcaggattatccactactggcttggtgttggccatcaagttaactgtcccgtatccgccatggagagctgcttgagacccagtttccaggtcctctttataggtcaaaccagggtctctgaagtgggcatggagttcgacaaaggcgggggtgaccactttgcctttggcatcaatcacccgaccgcagccttcactagccaggtttaaaccaatagcatggattttcccttcttttaaaaggatatcggcctggattgacccacgactatcaaccagttggccgtttttgattaagatcattttaactcctccgtatcatataggtgttcacaatactcacaggcataaacactttccaccgggtcgaccaggataaagctcggttcgatatggggctcggtattggtaatgcaacggggattggtacaagacaggtaggagttaatccgcttagggagggcgacttcccccttgtcaacaatttggctatctttgatatagttaacggtaatatgagggtcaaccacacttaaaatatcaaagttaatatcgctcaagtccccttgaattttaataatatcttttttacctagcaactgactatctacattcatcataagggccacccggtcttgggcccgatccaagttcaagaggttaaaaatcttgtaaccgtctccgggttggatgtggtcaatcacgacgccatttgtaatagaagaaacttctaacatttacttcactcctaacatttttaagatcaaggccatacgcactctgaccccgtagccaacttggtcaaaatacttggcccgaggatcatcgtcaactgaaacatggatttcattgacccgtgggagggggtggaggatggccaaatcagctttggcttggtctagcttgggcgtgtccaaaatatacgaatccttcaaacgttcatagtcggcttcgttaaaaaatcgctccttttgaaccctagtcatgtagaggacatccaattcatcaattacactttctaaccgttcttctgtcttatattcaacattattttgcttaagcatgacttcaatatagtcgggcaccaccagctctttgggtgaaattaggacaaaacggttgttagggtactgcatcagcatacggagcagggagtggacggtccgaccaaattttaggtccccgcaaagaccaatcgtcaagccttccaaccgccccttagtttccataatggtaagtaagtcggtcaaggtctgggtggggtgctggtgaccgccatcgccggcattgataaagggtacatcactggccaaccccgccaccatggcagccccttcttgggggtggcgcatggcaataatatcggtgtattgtgaaactgtccgaatggtatcagccaagctctcccccttggccgttgaggaggatttggcttcagtaaagccaatactagtccccccaagacggcggatagcagattcaaaacttagccgggtccgggttgaaggctcaaaaaaaagtgcccctagaatgatcccatcacaaatatgtgaataatcatctgggcacttaataatatcttgggctaaagtaataatgtcattgatttcatcaacagtgaaatccttaatatgaacaaggtttttttcagataaagtcattcctttattccccttccacttttaggctcaaattgtcaatattttaccgtgaaccataagggctgtcaatatttttagtgaaattcaataactttttctcgttgggtggtcgcatgaaattttgggataagtctcagtttaagttgacattgggttagatgtgtttattgctggctgacatatttttcaactgttcgattaggtttttttaccgaaagccaaccgattagggatcgtctagcctccttatggctaaattttctccactcccctgactaaaaatcttcacaatttcctattattttggtcatcaattcaagccggtccagtggtaaaataaagtcagcttgggaagggaaaaggctccccaaaccaagtataactcataccaggaaaattttgcctggcaaattacactacttttcatagaaaggaaaagcaaaatgaaaaacaaactcgctttacttgccgcacttggactaggacttggcgtcttaggtggttgccaaaacaacaacgaggaacctgctgaagatacccaacaagaagagggcatgaccaaggaagaaaccgacgaagacatgttccctgataatggcaaagaggaagacgatatggaccaaggagccgaagaagagtctgaggacggtatggacgaagagtctgaagacgacatggaagaagattccgaagaagacagtaacaactaagcccctgcccaaccacttgtagtctagccatacaccccctagagggaggctagcccacaagtggttttttagattacttgactggttagatggggaaagtcgattatcgctgaccaattgtagaatcttggagttataattctacaatcgttgatcaattatagaatcttggaccaggaattctataatcgcagatcaattgtagaatcttggaaccaaaattctataatcacagtccaattgtagaatcttggatagcaatgaaggattgaccaagatgtaactctacagttgtaaattatagactcggctggacttaattcaaaaggcgacaatcgccctccgattgtcgcctttcaacttcaaaacttccttatttctatttattgtccagttttaacttcaaaacttccttattttcatttattgtccagttttaactccaaaacttccctatttctatttattgtccagtttcaacttcaaaacttccctatttctatttattgtccagtttcaacttcaaaacttccctatttctatttattgtccagttttaacttcaaaacttccttattttcatttattgtccagttttaactccaaaacttctttatttctatttattgtccagtttcaagtcttaaaccactctattgcttctcgatactcgcctttcatgtctgttttaccagctcgcttgccctcgctagctccgatccagtctacattccccctcactagcgcctaaccaggctgcattacccctgctagcttctgacctgtcagtattatccccccgttcactcctaatgaacctgtattacttgcacactaaccttgactacccaatcttaccgcctcctaactcatacaattcccaatatccacctgccttctcccttgcaagacaaaaagcttgtcggctatcgacctggtcatttcatccggttcaatagcaaacaagctttttttataattcaatcttgaagatgacctggtctttttcttgggtcagttgatagttaaagccgtaatttgacaacaaattagagacgatataaaggcctaggccattgctggtatcttggtccaagctaaagttgatcttaaaagcccggtccaagtcaagtcgacttgggtcatgagacctgttggccacatagaaattcccgtcggtcacaccaatagaaatctgaccctggtttgggctatacttgatggcattgctgataagattggacaagataattttcaaggctggacggccaatgaccatggtttggtcctctaggtcattcacaatggagatttgcttttgcttggccaaaaggtcgtatttggccaaaacttcttggaggactgaattaatgatcaaccgctcttcatcatccttcatatggtccagggaagaaattgaaagaagctgggagatgtgctgggttaagtcgtccacaagggcaatgcttttgccaatatacttgtcccggtccttgtatttgccgatattgtattgcatgttttctaatactactttcagactagccaagggagtcttgagttcatgggaagtcccacggaaaaagtcatagcgtaagttttccagcttaattatttcttcgttcttatcttccaaatcgtcgatggtctggagcaagctcctatagagatcattgatctggtctttaagttgaccaacttcattgctagaatcgaccttgagccaggctgcccgatccaagtccatcatccggtcagtgatgtccttaatctcctggatttgtcttttggtcacttgagcgtaaagaagggctaagagaatggaaattaaaagcgacaaggctagtgaatagggtaaaaattgcagggacaagtcccgggcctctctttgcatatcagctgtggaaacaaattgcagggtcctctgaccaccgtccgccaaatcaagggggcgttcttctataatcaaagagttgttttcactggtcaaatcaactccaactccatcttggatggcgagttcattttctccccctccttccttcagactggcccttatatcattcgttttggagtaaaaatctaagctagcctggacataatccaggtcctgtccttctagctggtcagcaatttggtctgcttggctgacaatttcttcctgacggctggccaagtaggactttggaaaggcaaaaaagacaaagaggtggatagccaggatcaagacggataagatggcaaaaatttgcagaaacattttgggaaataattttaaatttttcattttcgctccaacttgtagcccacattgcggatggtgacaatacagtccaagttcaattttttccgtaattctttaatataaacatccaccacccggtcataagggatgtcatcagtctccttccacacttgatcaataatctgggaccgacttaaggcccgcccctcattgtctaccaagaatttaaggatttccatttctttagcgttaaccgccacagggttccctccaagctgggctgaatagctagtaaagttaacctggcaatctttataggtgaacagttgactctgaccgtactctttcttgatcaaggcatcaacccgggcttttaagactggcagggaaaaaggcttttcaatgtacccatctgccaggctagaataggcatcaatcttgtattcttcatcatgaaaggccgtcaacattaaaacagggagatcgttctggcgacgaatttcctttaagactgccaaaccatttaaaaagggaatttggatgtccaaaatcaccaagtggacgctggtagcttggaagcatttcaaggcttcttgaccatctttagcttggaccacttgatagccaaattctgccaagtattctgccaaaccctcccgaatcaattggtcatcttcgacaagaagtatcttcattgctctgctccttcaatttcgttaacgcttttattatacaccaaaccagggtgatggccctggtctttttttggctagtaaaaattgatcatatagcattcttctttactggaccaataaaaagtattctcaagatactaactaactgccaagcttaagacgagctaaccctgctcctaaaaccagtaaaggaagcagtgtcaaccactacaccattctttcctatttgacatcaacgaggaggtctttcggatctttttgtaaaatagggaaagatgataaaaggagggccattgccaaaacaaggaggagtaagattccaacaagcacgatagcttgaccagatagttgaacatttaagctagacagggtcttgttaaaaccgtctacttctgctcctccaccaagtccagtcgctgcagattcttgggcaatattttctacaataccggatgtaaccctttgtaaaacactatttccaatccttttacctaaagcagaagctaaaaagattgatagggcaaagcctggtaaagcaaggaagaagagttcaagggcaaactgaccaaataactgaagcttggagaaccccaaagacaagtagatcgcaacttccttcttacgggcattcagccataagaaaagaagaagggcaaggatcaagccagcaaagatcagtgaccctgccaaaagttggtcggctagctggtaaataccggagacggatgcctgaagagctggatagttggaagcactctttatcaatgtgtagtcccgccagttaatattcaattgacccaggtccttgatcacttggtccaagtctttgtctcccttgacaaaaaagcttgcatcctggtaaaccgcggtttcttctgtattgccataaaccttggccgcagtgtctatgtcagtgactagggtgttttcatacaattcttgcgcggccgtcacccctccctcattgtggccgtcaaaaagtcctttgatggtaacttccaccctctcatctgctcctttttcattatcagcatcataaaggttagacttgagggtgaatgtgtcgcccacttttaacttatttttctcagccaggtccttgtgcattaagacttggcttttatcttggttggtcaagtggtctccttcaaccagcttgtaagctcctgagacgaattttgtctcctggtctgattcattaaccccagtcaacatgacagctgagccaaatttttcagcccggtctggcgtttcattggccagggtctggtctgtttgaacaatgtccaaatcctccaagttagccacactgttaatccgcttgacatagcctgcaatatctttggcattggcaattttctggatgtcctctcccttgacattacctccaccacgaggggttcccatattgacttgatggttgatttccatggtaaaactattagtgatattcccaaaagtttctcttgcagcttggtcagtagctcccttgatagaccaagaaattaaagccagggctgacatagcagtcataatgagtaaaataatgagggatttaattttcttccgtgttacataggcaaatgcatttttaaccatgtctaaacctcctgaattaagttttggctttggtataattttttatctttaagttctagaatatggtcagcagcttgggccacttccttgctgtgggtgaccacaattacgcatttgtttcggccatgagccaagtctttaaagagggaaatgatgtctgttgccgtcccttcgtctaggtttcctgttggctcgtccgccaaaataactggcgcttcagaggccaaggcccgaccaatggctacccgctgttgctggccaccagagagtttgagaacattgcgtttgacttggtcttggctcaagcccaagtccagtaatatctgacttgatgcttgcttgttgactagccggacattctccagtggggtgaggtagtcgatcaaattgtaattttggaaaactagggaaatattattttttcggtggctcctatacccctcttggctgatatctgcctcttggaacaggacttgaccggaactaggcttgtctaaacctgccaataaggatagcaaggttgatttgcctgaaccagacttgccaataatagcgtaaaattgaccgggttcaaaaatgtagtgtaggttcgataggactttttccttaccgtagcggtaggtgagattggttatttctaaaagtttcatcttttttctcctaactcatttgcgataagatcgcctttggttttttgactaaaatcatagcggatgctacaaaaacagataagacaataataagaagtaaaataccataactttggcccaagatgaggaggttctgctttaagccaaagtctgtttggagtaaagggactgataagacttgacctaggacttggtttaaaagcattcgacccagtaagaaagagatcaggaggcctggcaaagagaccaggatgagttctaggataaattggccgataacttgtaatttgctaaagccaatcgttaagaggacgccaatttcatatattcgttcacgtaaccataagattaagataagggagagggcaagagctcccgcaattaagatggccaaggtcatcacctgtataatctggcgaattccagctaaggaagcctgggctgtttcataggcctctgtgttctcctctacccgaaacttagctggtgcaccccccatttcatctaattttttagaaattttatctaattggtcgggcccttttgcaaaaacggcaatttggctgacttcttgtttactcccctttaagtgaagggcagtctggctagaggcgtagtcggtatagaccatattctcactcaagtcagaagacaggcccgtgtagttttcctgctttttacccgaaaaaatacccacgatttcatattcctgactttccaaactttcctggctttccggatcaaacttttcattgctcggtctttctagactttcctcgtcttctgggccctgttttttattgtcctggcttcccggactgccctcgctttctggactagggtttgccatagtttcatcattttccaaatccagcatttgcaaacttagcttgtcccccaagtctaacttgttggcttgggcaaaatcttgatggactagggctttatgctggtccccctcctggatccccctacctttgacaagagtaaaaacgccagaagtgaacaagggatctcggtctgtttgactgatcgcttggagggaaagcaagttttccaaatcactggctaaatcatctcggtttaccttttggtcaccagtgaccggctgactccccaagctttgagctaaaccctcatattggtagaccaggctttgaacactcgggtctccttgaagccaagataagtcgcccacttgaaagtgacctcccccctcctttcccttaatggttaaagaagagttggacgattgatagaggctagcttgaacctggtcgctagactggaggatagccaagcaagcatataaggcagacaaaaccaagcatatgagggtaaagatgatcaaggtccgagactttttccggatcacataagccaaggcattttcaaccatatttttgctcctttctaggctggacaaccagcccttgtttttatctaatttcattttaggcgggaaatatgaaagctatatgaaatggaaaattttatttggacttgactctgctgactttgaaatttctcgtataacaattgttgtttgagaaaagaacggaagaattctctaataacgttagttgtttgagaataatctgctgaaattctcgtataacatttattatttgagaaaaacccacaagaattctcaaatacctattgttatttgagaaaattaccatagttatataataacatatgttctcaatactagccgaccacacttccccaagtcaagctcttatttgaacaaccgctgccaagctaacccctaaaacacaaataacccaccaccttattttccaataaggtggtgggttgcttacagtaaaagtttgcactataaaactttatcgggatctttttaattccattaaacggtcaaattccttctctagttcttccctttcctcgcttgtcaattccatggctgctaagcggttattgatggaagtcaggcgaaaatcaagacgtaagtcgctttcatcatctggacttggtttttgcttttccttttggtactgagccaagttgcctgggaaggtctttatcttttggtcttcgatcaagagtaagtcagtggctactttattgataaaagagacatcgtgactaacaaacaggagggggcggtcataatttactagtaagctttccaaggcttcaatggttccaatatctagatagttgcacggctcatccatcattaagaaattgaagtctccggtcactaacttagctaattttaccttggctttttcgccatcactcaagttagctactttttttgaaacttggtctcctttaaaagttagccgggctaagacgatccttgtcaagctttcgtcataaatggaagtttcttctacattagctagcactgacttttccaagtcaagagtgccagacaattggctgtaatagccaactttcaacttaggatggacataaacttccttgtttaagatcattttaagcaaggtcgttttaccggacccattgtctccgatcaaggcccatttgcgaccattagcaatctctagtttggcctggtcaaaaatcactttctgaccaaatcgcttggtcagctcttgggattttatgagagtttttgattggatcttatcctgttcaggtatggtcaattggatgtcctggtctttttcaggtttttccttaacatctaactgattcagccgagactggaccgctttggcttgcttgtctagtttctttttattctgctggccacccatcttgtggagtctagcttcagaattccccatacgattaggagtctttcggacatttgccgactggtcttcaatctcttgggttaaattttctaaccgagttttctctttgacatacttatcatattctctttccttgaacttctgccttctgagcctttcttcaaggtaaaattgataattaccattgtataattcaaatttcccagccgaaagctccataatcttattgcatgttttgttgataaagtcgcggtcatgggataccatcacataccccttcttccgagctttcaacctgctagctagcttttctttctggtcaatatccaggtgggaagtcggctcatcaattaagagaaaagcctcttggtcttttaagagactagttagctttaaacgctggtactggccagggcttaaactttcatcagggtccaattgagccctagagtaggtctcgccagaaaaatccaaatccttggtctcatcattcatcagccaggccaatttagttgaaatgtctagctgtccctcatagtctgggtctatcccagctagaatttttaaaaaactagtcttccctgctccattatttcctatcaagcctaccttgtcttggtcacttatagacaagtggtcaagatgaaataaatttcgatcagcaatagatttgctcaaatgattcatgtttagcataaaaatcctcctcgtctcagagaggattttaccctctcttactgggcgggtcgtctgctatatattctcattggtctgtacctccttgttaagatagcctaagtataacatactcaaaggaaaattcttcttttttggtaagggcttagctaatcaagtcaaaaaagccatctaagctgacttgcttagatgactgtcttgcctaattattttgaactttaaagtccatcttctccaatgcaagccggcgcttggccccttcttctagcagggtcattaaacttgcttggtcttcatcctccaacgcctttttcaacaggtcaaactggtcttggaagttggccatggccctcaggagggcttctttattatggaggaagagttgctgccaaaggggggcattgatattggcgatccgggtcaggtcgcggtaggagtcccccataaagtcggctgtctcctgtccagcttggtcactgttaattagggaaatggctaggatgtggcagagctggctcacataggccaccatccggtcatgggtttggtagtccacctggcgaacacttttgaagccaagagctgttaagagctgggtcaaaaagtggacgttttctggcttgttagcgggtcttggggttagtaaatagttggcttggtcaaagaccgtcttgtcagcataggcaaagccttggctttcccgaccggccatggggtggccaaagataaagtcgacttcctctggtaaaatcgccaccacctcttctaccactctccccttgaccccagttacgtcagttacaatcgcccccgccttaaaagaatcccggtggtctttgacaaaggcaaccaagtcatcagggtagagggtgatgatgaccaggtcagcttgttgcaagatctcccggttggctaactccccccggtcaatgaccccagctgcaagtgcttggtcgagggttcggccatcccggtcaattcccatcagcttaaccggaaaatcttcttgctccttcaaggcccaggcaaaagacccgccgataacccccaggccaacaatggcaatctgaattgtatcttccatagtctagtctccttagtcaatagcaaggggttggaaggccccaatgatttggatatattcactggcaaaggctaagttttgccacaagagttggtagtctccccccagattgctaacatccacctcgataaagaacccgtaacggaaaggctggttggcaatgggtctggcatccagtccttctaggttgcaatcaaaaaggtcaaaaatattgagcaaacgaaccaaagagcctggctggtgcttggtttccacataaatcatccaccgggttcggctaggatattgcttaaaatagtcctctaattcctggtctaagtccagtggtgtctttgaccagtgcttggctaggaaaaaacgagtggtattggtctcttctgtttggatatggtccaaaagaggaacaagctggtagagttcaccattttgcggaccagccaaggcagccttcttggggtctccttgatcatggatataccatgccgcctgagctgtatcggtaaagggaaccggttcaatttgtggatgggcctcaaaaaaggattgacattgggacaaggcttccggatgggagtaaacctggcggacctggttcaaacttgactccggcaggccccacaaggtatgacgaacaggttggtagcgctcttcttccacaaagatgtcccggcccttaaacaagtctagggtccgggtgatcaagccagtggtggagttttcaaccgggaaaacacccaagtcaacctggtccctcgtcaaccggtccaaaacttcggggaagttcaaacaaggaaccacttcagcctggccactttcctcgactccttcctttaagtaagtttgaatcacggtttcagaatacgatcctgcaatgccttgataagcaattttcataactttcctactttctaaaccttgaggcctttgataaaagccgctgtccgttcactcttggcctggtcaaaaatctgaccaggtggcccttgttcgataatgatccccttttctaagaagcaaacctggtcagagacctccttggcaaaattcatttcatgggtaaccaagaccatggtggtatccccatgggcaattgactggatcaaatctaggataccggcgaccaactcagggtctaaggcagaggtgggttcatcaaacaagatgacctcaggctggatggccaaggcccgggcaatgcccacccgctgttgctggccgcccgacaggtgagaggggtagtagtcttcccggtcccccatccccacctggttgaggtagtagcgggctaggttcttggccacttttttggaccgtttttgaaccataatcaggctttccataacattttccaaggccgtctttttagagaaaagagcataattttgaaaaaccatggctgtttgccgccggatctttaagaggtctgcttgactaatagcttcaatatcataggcttggtcagccatttcaattgtcccattatcagccggctccaagaagttaatggtccgaagcaaggtggacttgccagacccagatgacccgatgatggttaaaacatccccagtggctacctccaagtggatatcttttaagacttggtggttgccaaaagacttgttccaattcgatagtcgtaacatactttccctcctatgcttttttactgtctagcttgggcacttgcttttggcttggccggtctggtatattcagtcgtcgctctaagtagccgaccccgcgctcgattaaaatacaaaagagccagtagaggagggctacagcaatataggcttcaaagaaacgaaggttagcaccggctaaaatccgagcttggcccatgatatcaatcacagttacggtaaaggctaaagaggtccctttcaataaactaatcaagctgtttcccaaattggggatggcaacgactagggcagagggcaggatgatccgccgcatggtctgccgatcggttaaaccaatcgacttggccgcttcaatttccttgttgtcaactgataggatagctgcccgaaaagtttcggaattgtaagccgcttcattcaagccaaaagccacaaaaacatagaccaaggctggtattccattgacatctaagttccagcccgcttgctggttgagccattccaccaccaaggggaagccataaaaggctaaaaagagttggacgagttggggtgtcccccgcataaaggaaataaaaacctggagcaattgattgaccacgggaacttctttcagccgaattaccgccagcaagaagcctagagcaagaccgatgacccctgctacaagggtcatcaaaacagtaatgggtagtcttgccaaaatatctggtagcatttggataatggcttctggggcaaagatcttaccacttgcagcttctggctgatcttggtcttccctttcttgatcagggtcaacctggccttcttgctgtctttcggcctcgatggcatcattttttgcaattatttccgggctgagttcggtatcatcttggcccaggtagactaagctcagttcagccagcctaccctcctcacgcatctccgccaggactgtgtccattaaatttcttaagtcttcatcttggtcttggtaaataaagtaagaccctggtggctggatggcttcttcatcttcaatagggtgagactggagttcaatcccaaaagtatcctggacatcctgtaaataaatggtcttgtaaatcgtagcatcaaagcggccgttgtaaacgtcccggataatggtagacgggtccgaatcgacatactggatatccaccgccaagtctgggttctgctcgttccaactttctaaaaacatggactggggcgaggccggaactaccccgaaagactgacctgctaagtcttccaagtctagattagccggctggtccgtgtccgtgattataacattgtgggtgataacataagggtagagggagaagagatacttgtcccgccgttcctcattttcacccaagttgttggccaccaggtcaaatttccctgaatccaagccagcaaagagggaagggaattcagtaatctcatatgtaatctcaatttcctccaaacgctggtctatttcatctaaaatatcaatttccaagccggtcaattcattattatcgtcgaagtagttgagaggtttggtctgtcccgtagtccctaccacaacctgacgaggctcttccccctccgccaaatccacttcatccgaaatggccgactccgaaccccttgcttctaccctttgcgtgactgagcttgacctagtgaagcagagtaagccaagcaagaccaatactagcgatacgaatctttttttcatcccatataccctccaattgtagcaagttgctcctttggaataaataaaaaacacctatctagagtcttaatctaaataggtggtgtagttaattggttgggttctggcgaccacttagtttaattctctaggtggccgatccagcttaaatagctttagccattagagatacaattcagtttgctgactgagtttgtatccataatgactgacttatggctacaaactgtatctaaaatagctaaagaagaagttagtctttaaattgagcacttgctggttcatgtgatcttctcctttataaacttgtaagactattctaccataggggtgatataaagcaaggattttttcatttttctttaatgtttttgttggctgaaggtgaaaggctcacaggtcactttctagcatcccgtaaacataactatctgtccattcgcctttgttccaaaaatcttgcaaaaagtgggcttcccttcgcataccaagtttctgacataagtttgctgaagctgtgttgcgagcatccaagttagcttggatgcggtgaacttggaaggtagaaaagagttccataatgactgctcgaactgcctccctagcatagccctgcccggaataggagggttaaaaacatagccaagctcaaccgtgtctttcttgtcggtataccatacggagatatcgccgattactgtattgtctaataggacggctaaattcaaagcagactccttgtccaagttatggttattcagtttttcttgaaatttctcttccctgtcttggtcttgccaaggatcttccaagaggtattgacagacctggtcattggaatagaattcaaaaacatcagccaggtccccttggttaaaagggcgaagagtgagtcggtcagtggttagcttcatattggtctccttttcaaaataagattaactgatctggtccaatggcatttttttacatctgagtcaataaagtcccttcttatgggtaacggactccaccatcagcaataaaggattgacccgtcatgtaggccgaatcttcagaagcaatgaatgaaaccacgttagcgatatctttaggttcgccgagtctaccaagaccgatgaggtcaatatatgaatcgataatctcttgatccgatagtttttcgtccgacgatgctttaaaggcttctaccgcttgatctaaaagaccagttccaacaaagcctgggttgtaagagtttacggtaatttggtgttcagcaagttccttagaagcgacctgagtaagaccgcgaaccgcaaatttagtcacagagtaaacaccaagtaattcttggccttcctcacctgctacactagaggcattgataatccgtccacccttaccttgcttgatcatttgcttggcagctgctttgattccaaaaaagacacctttcacattaatactaataatttgatcaaggtagtcttcacttgtatcaatcaactgtcccaacttgccacctataccagcattattcacataaacatcaactgatccaaatgtatcaacagcataatccactaaatcaacatggtcttgatttttggccgtgtcagcaacttttgctgctacttcatagcctttgtccttcaattcttcatatgcttcttgtaacttctcttcatcgatatctgacacaacaactttaaaaccatctgaagccaaacgttctgcaatcgctttcccaattccctgtgctgaacctgttacaacagcagtcttctgtgtcatattcatttcctccctttatttggtaacttcagtatagcaatgatcagtttataaagagaagtcatatgatatatggattatttataagacaaaacttaaaaccatataaaaccaagctttactttgattaaaccataggaaaagtctataattaatacctacgattttagaaaagtgtgctttacaaagcatatccaaagcaccttaaaaattctacagaatactgtaatttaacgattgactgtcttctaagaacatctgtactgtttctttcgaatattgggtcaggtctttcccaaaattatccatcttgccaattaattcatgtgtacaagtgattatatcagcacctactttattagcttgaactatgtttaaaacttctctaggacttgcccaaagcaattttacattgtttttactatgacacagttcagcagattcttccattattcctagtggatctacaccagtatcagctattctacccgcgaatactgatacaatactctcagtattttcgtttaatgcagacactatatctttaacctgttcaatagtgaatactgccgttacatttaatttaattccttgattggataattctcgtatgagcggaatactggattcaccttttgaattcataatcggaatcttaacaaaaatattgtcgccaaatgaagttagcttgattgcttcttttttcatttgaacaaaatcatcagagaatacttcaaaagaaataggtgtgtcaggaaatgtattcactacttcttctacaaaacttgtataattagaaacatttgccttcttcatcagtgatggattagttgtaaaaccacaaattttcccatctttataggtatgtttcatctgttcaatatctgctccatctgcatatatttcaatggtatgttctcccatttttctactccttccatccactattcatcataatccacattatttatagccaggtttgatttacgtataaaattaggtaaaaagagaactactaacacaataaccgctagaatatatattcctatactgttaaacaaattaccaatttgcccaagtataatccctactacaccaaaatcagtatccccaaaagttgtattcgaaaaacctaaatttcctaaaacaggaagtaacaaagcagggataaaagatatagctaaaccatttataaaagaccctactattgcgcctcttctgccaccagtcgcattaccataaataccagctgtcgcaccagtaaagaagtgagggaccatgccaggtataatgagaactccgcctagtgctccgagtactagcattccaataattcctccaacaaaagaagagacaaaaccaatgatgactgctgtaggtgcataagtaaagaatacggcacagtcaaccgctggaacagcattaggaatgactttagtcgctattccttgaaaagccggaatcaaatcggctaaaatcattcgcacaccagcatatacgatcgacacccctactgcaaacattagaccagacaatattgcaaagataatgtaattttgatccccagatagttgagaaacaaaatcaggtccggccacgacagcagctaaaacataaaagatgaccattgtaatagctgtagaaatagtagtatttctaaggaaggaccaacgttctggtacttcaatatcttctgtagacttactattttttccaatcaatttaccaatcaacccagaaagataatacccaacggagctaaagtgtcccattgcaatatcgtcaccatctgtcacttggagagttaatttttgtcctatagctggtgaaagtgcactccacgcacccaagaaaaatccaccaagcaacactaactcccagccaacaatccccatggcccccataactgctgataataggcaagccatgaagaagctatggtgacctgttaagaaaatatacttataatgggtaaatctagcaataatcaaattagctgccattcctacaactaaaattgacattgtctccacacctaacaactcttgggctactgatacaactgcctcattgttaggtacgaccccggttatattgaatccagcttcgatcatttgggccagcgggtctaaatttgaaacaataacactagcaccagcatccagcatcaaataaccaataataggtcctaaagttcctgtcaatattttatgaggcttagctcttaaagctattagaccgacaaaagacattaaaccaattagaaaagctggttcagttaatatatcttgtaaaaagtttaaaacagatgccattggctttcctccattcttctgttaactatcagctagtttttttagtacaggtaatacatcttccttaatttttttcttattggtgtaggaacggatgatcgcaattggttggtcatctggaaatatactagcgagctctttaattgttactactaaatctgcttttttgccttgagcatttcctgaatcaacagattcagcttctaaacttattccctcttctttagcgatttcttccaatttcatttttaacaataggctacttcctataccattcccacaaactgtaataacttttaacatagttattctccttccatttgattaaccaagttttcaattttttcatatatatctattggattatctagttctataatctccttgatattatcttcattgtctaatattttggacaattgaaccaaagctttcaaatgagcttcaccatcaatagccgctaaaacaaatactaggttcacaaatttttctgggtctttctcatgttcagtattaaaatccactggatcttctatttttaataaactgatccctaacttattgactcctctctcaggtcttgcatgggggacagccacttgtggtgctaacacaatatacggtccaatattatttactgtttctatcattgcatcaacgtattctttctcaatatactctttatttagcaatggttcggaagcttttttgattgcttccacccaactatcaacatgtttgacagtctgtaccattgatgaatcaaatatttctgtcaaattcttcacttcccctaaacgagataatgatcctctttctctatataaatagttttgtatttcctttaataaggaatttcggtcttcaatagctgcatgcttttctactattttcagaatatctctgctattaactgaatatggttttgataattcagaaaattcggagctaactttctctcttaaaacctcctgttcaattgggttcaaaatgggactaatggtaaaaacaggtttttcgcatgttaaataagttgtcgtaaataccatatctatatctttcaatgtactatttgttaaatcttgtaaactatgcagttgagtaatctgcaaatctggaaatatattttttatagttgatgacatgattaaggacgaacttattccatttggacaaacaaccgctgctttaaggttaatcttaggagaatatctacttaaatagccgccaaaatggatcgtaaaataagctatttcactttcggaaatagtattattgactttactttcaagtggctctaatatttttctagttatttcaaataggtcttcatactcttcttttattttttcaagcagcggattatcataataaatatcaaagaccagtctgtaaaaagccggaatgatgtgctggcaaagggtcattttcaactgactatcctgaatgaaattaacacccatgatcgtattcgcttttaataaaatctcttccgtaagacggtcaaaaaatttcttatcttgatcatttggtgtaaataaaaatatacctaacatccgactttcccaaaaatgtatttcacttttggtattatctcctaggagatcatttactaattccttggctaaattaagcataaagtgtttgtctagtaaacgaatttcccactcattaaactctatagaagaatgagtgtccctttgcttcataaaagctaaaagataaataaattcttctgctctatcatgaagaatatttagatgatatttttgactcaattcaatcaaataattatttattgcttcaacaactttgtgatcttgccaatcttttttaaatgtgaaatagactttatctaaggggaatttattctttagtttacaaatgcaaatttccatcattctacggatatctttttcataacctgttacttcatacccgttagtcctgctataattgattgacaaaccctcttttccaatccactcccttaatttttttaactctttcatgcttgcatttctacttaagcctaagtattcctgtagatggatactagatatatagcctttattacacacaatatataagtagagaaaataaatcctttcactttgatactggtaaaaatcgataaaagattcatccactattttattaaactggtcgtacatggattgggaaataaataactctttggaatcgtgatcaatcgcttttaaaccagtattcaacaatcctctatttaattcttgaagttcataccaaaattgcttacggcttttatttaacagaactatcagtttttcgatattctcttctttgctatttactaacttttgcaacagtgaaagagaagttttcttaagcatgcttatcacctagttacattatcagtgtatgcgattccacaatcaaggacattaaagtatctttttttagatggaaacagatagaagaatgtacccatgttaaaatagtttattaatcagaaaaaattcactatcatattaactaattatcgtagtgataaaaatactatattatgacttgctaccctcataaaaatgcgaggaaacaacttttgtctcctcgcattcaaccttattttgatttaaaataatccttatttcttctcaaaaatggttagaagattagctataaaataagtctaatccattggttgcacttttccttcaataaaatcaatttcttcatcacttaaatcgtatttagcatataattgttggtcaatttctgaaattgacttagaccagtcaatatcagaattgtcactaaaatcttgaggtggattgtaaaatcaagttagccacttgcatataaaaagtcatgtgaatttctgttatattagtagtcgacaaaaacaatgaatataaggagaattcacatgactcaagcccatgatagcacactttcccctaaaggaacacacttaactccagcggaaatgcataaaatcgaagcctataaggcagaaggctattccaatcggcagattgccaagctgctcggccgttgtccgcaaaccatccacaatgccatcaagaccggttctgtcccccaaaaacgccaacagaaacactatgggaaaacttacacctactatgacacgatctatttcgccgacgtccatgccaaggcctaccaagaccaccgccgtcattgtgggcgacggcccaaatgggtcgacaactccgcctttcttgactgggctgaccaaaagctcttgcaggagaaatggtcgcccgatgtggtggtccatcaagccaaagaagtctttgagcctggccagattcccagcacgtcaactttgtaccattggattgaccgcgagttgatgcgcacacggaatggggacttcctggagtaagtagggcggaaagaacgccctcaaaccgttgaaaatcgtcaatcttttggccattgggagatcgacacggttgtgggccgaaagcgacaaggcgaccctgttttactgactctggtggagcgcaaaactcggtttgagaagctctttaaaatcccctgtcaaagtgccagagcggtccatcaaaccttacaagctttttgaaggggctggaagacaagccagtcaagtcttccagtcgatcacagctgataatggcagtgaatttgctagcttaggccaagtctccaaagtcatcccctctttcttctgccatccctatgcttcttacgaacgaggcagcagtgagaaccaacataaattgattcggcgcttcttacccaaataccagtctttccaagacttaaccgacagtcaggtcagccgaatccaacaatggatgaatgggtatccccgaaaaatcttaggctatcggtcgccctaccaagcctttgtccgtgagttgaggcaattaggctaacagagatagtcgttatcttttgcttgacatgggaccccgctgggcatgacttggcttgtgtgttgatttggcttgaaagccaaatccattcgaacacaatccgctcctgtcgtcgcagtatcatgcccatccccatttaaagcaaaagcagtgaccgtcggcaaaactataaccttgtgaaattcagaaaatttttaatcgcagggtggctaacttaaacttgaaatctacaaaataataattatcctcggtaatatagaatactccttgtaaatttgcccatggagtcactctaattggcgttgagctttcacttttgaaagcattccaacacatcttaatttgaatatcaaccaaaacctcttcgatcgctggcgaatcgtctacaccaattctaataatgtcatgtccctcaaattcaatttgatcatagttgcgatatggataatgggctttaatcagtgattcagaattttcatcaaccaaatctttcaagtcttggtacagaacttctttatactctgcctcaattaattttttaagtgaagccaaatgaaaaccacctccaaaaaacgaacgtacgttcttattctagcatgtgacttccttttattcaatataggttattccatcggctgaactttctattcgatgaaatggatctcctcatcattcagaccatacttgacatagagttgttgatcgatttcggggatggacttaattagatattgatcgatatggaaactctcgtgctatagtattctagtctatttctttcataatttaagctatgatatattcatagaatcaaggatggtcgatcctctagctagttaaataatgactattcactcggttcattagcaaaactaatatcctctaaaactatgcaataacttagacaggtcatcattacttttaataaaatccattaagtatgactcatcaataatgaattgctggtgcccttcttttttaggagtctttgttgctaaaatttgatcacccttgcaatcagtaatctgaaaactatgaacaattcgtcctcttctttgtaccaaatcatcgtacagattcgctatctcatcgaatccaaattgattagcaataatttgtctaacctttttcttgagtttttgataatttgaatccatcaagatataccagtcatcttgatctgatacatggaggatattttcaataataaaggcattatttgcattgaacacacaaagagctgttcctaataattcaagatattccttactaggcagtgcttgactaatatatattttattcatattgtttctccttgataagcatttttatttattccatcggttgtactttctcttcaatgaattgaatctcatcctcactcagaccatacttagcataaagttgctggtcgatttcggggatggacttggaccagtcgatgtcggagttttcagtaaagtcttgaagagggatatatttccaaatgtctttagttgcattatcatgagtggctcgctcaactcctagcagggctctaagaaacttagttcgtacatacgttgaaagattattcgcttcggattcagaattaaactctccaaaacttataaaagattgggtatgacctgttcctggtgtcccaatttctaattgacttaaaggttctccaaaaattccactaccattacttttagctacaaaaaccttatatctatctaaattaacgtgatcttgtaaataagacttatgaatatatctataaactctcttcttattagctaacccaaatatgcgcttatattctgtacttagtactccttcaggagttttttctaaaaaaatttcaggtaacttttcaaatatattcgatccaatcgataatctctcagattttttaactttagatttcaaatctttattatcctcataaacttgattagtcatcctataactacttctattatgatgtatgtcagagaggtttaaatcggatattttcttcactttatttataattgataataactcagaactttctataaacaactctattgctccaaactcaatatcttcgtcacgataggttacaactactccacccttaatatcagttgtagggaatatcttcatagcgtttttttcgtagtaaactacctttagatgagggtcggatagcatttttttattccaactttttggcgtttgcccagaattaaataaaaatctggctggtgtaatcaactctacttttgaagataattgataactctcttccatgaatagattatatataggtgtcgctctattgtttcctacagtatcttcttgatacggcggattcccaatcacaacatcaaacttcatttgctcacctccataagccttcactaaatcttcctgcatagtgctttcttgtgctgacttggccatatcccattgaactaaattgctagtatcgatattaccatgaatcccataaacatagttcttggcaatgttataaatgatattacttggcgctactccaaagacttgattctccaaaatccatttaattctctcttcctgatcagcaatctggtcttttaagccttcattcaaacgtttgacaagttcagtcaaatagagcccacttttagtatagagatccacaaacttcaaattcttattttgaaatatgtcagggttttcttcttctaacttatccaccatcatcttaacgacacctctcggggtgtagatctgattggtttgttgattaggaatatagtcaaagatatcttcagttagactctcatcaaagtagttagcaagctcttcctttttatcatagaattcctgcacactcgcattgaagactgtctcgtcaaagaagcccttgaattcgcgctcttgcccttcatcatcggtatacttgaagccatcgcgcaacttcttgaattcctcgatagtgatggaagtaatctccaagaaagtctctggatcgatgttcacttcaaagttatcaagccttgtttcacgatctccataagccattaataaagcaggaatggttcgtgtaaagccgcgtaggtgatcacgggtatcttgttctgtcttgtttttcttgcgctcttcaaccttcttagactcattcttaatcgtcttctccaatgttttttgggtgcgctcttggatattcttttggaattcttgacgaagttcttgttctttagtccgccgctcttcatccaattccaccatggtcttggtgtttttaggatccttgagtgcttcattgtaatctttttggatgtaagaagattgagttgtgaaatgctccatttcttcttcaaccacatctttaatattctgacgcacattggtctgaacacggttggtctgtgctttgttcagttcgaatagatcctgtagttggtcaaaatcatcctcaataccattcataaagcgattggttaaaacggtcacggtcacggattcaggcttatcatcaacctggaatattttgtcaccaaagacatgcttagtccgattgatcacgatttcatcagggatttcaacttcgccgcgttcattcaacatcggatctcctagatcgattggacgcttgtctttgacatgcttcttgttctcttcggccgggatcttctccagaataccgaccaattccttgggagctccaaagattcccacaatattattaaagagcagattggacataaagccttgacggacgatttctcgcgccttgatatggcgtggaatggtcagtacttcttcggcattaagttccttcatctcaccttggtcatcttcggcaatgaccgggaagaagttcaatagggtcttgatctggtcatgacgttgcttggtagtttcagaatgaccgggtgtcaaattattggcgaattcatcaaagagcatcaaagtacgttccggcgcaaagtcaaagatataggcgttctctttacgatagagttggccctctttttcgtattcataaggattttgtgctctgaaggcggcttggaagtataggactggtgacttgatatttgacagcattaagacagccgtccattcgggaatagttaccccagtcgtaagttgtccaacggataaggtaatggtcttcggatacttagcaatcgcttctttgaccttgtcataagacttttgattcttcttagtctcctgactttgttccagttcactctcgctatcgactaggctttcgccatctccagcggctaaaatcacttgataatccttgaagactgggtgtttcttaaatagagcttccagtgccttagctgaggcaactctcggtaagagccagaaggtatgatctaattgatgacggtattcggtgggagagaaaggcattttaccttgactcaagttatctaagaacttcaccacgctggcttcatactcgaagcggccgttatccttggtcgagaagaactcattcaagtcaaaggcataatccacattgttatcttcttcgaggttggctcctctttggagcttgtcttgaactaagccactcatctggtaggtaaatagactgagtgttggtaacttttcataaggattagtatctaactttggatcccaattgaccttggcttcttgttcatccagataagaccagttatagatctggccagccgtgaatttctcattagctattgccttaaagggggtccccgacaaatgcagggtaaagtcacgattaatcttgtcgaaggcacggtctgttttccgagtatccactccctcgtgagcctcatcaatgaccaaaagatcccatggaatttcggcaacccaatccagttttttatgaggtccacctgcaaagcgagctcctttaaggtcctggagtgaaataaaggtcacttgtttagcgtcatctgcctctttggagaccgcaaattcaacaaattcatcccgagtcattcccttgcccttcaatgcatctgtttcggaaacgaacttcatgttagggtctttgtggctaataaacttatggaaatcttcataccaagagttagcaatcgcagggcggttggtcacgatgagcgtattcactgctcccatgcgcaacatcaaatcataggtcgttaaggtcttaccaaatcgtggcttggcattccaaagaaattcacgttcattccctggctgatggcaataagttaaagtctcctcaacagcctgcgcttgttcgctccggagctcataatcaatcggttcaatggctacttgttgcttgctgataccggactgtatgaactcatctgttagagcttctgcttgatcaatttgaccattaaagtaaaaccattcattagcactagtaccaaaatgatgacggcgaattcctcgtgagattaagtaacggtgaaggtcactgtcatggaaccactgaccgtcttgcttttgggcagtgcgacgaaatttaatatttggcgttaagccagctgtccctaactgttcacgaattcgatcttccacttttctagaagtttccccaatcttaatatatccatcatggtcaggcacttgaggcagtgtataaccatatacctttaaatccatcgtttcgaatggcttaatttgaacgcgattcacctaactcctccatttcttctttatacacatcctctaccttacagggtgcataacggtaaattttatctctctggtattcttcagtgctaacatccgtctcttcaaataagtttaattgaataaagtcttctttctcttgatcagtatagataaaaccaggatcatgatgaatatcttccgatatctctgccaaactgtactcagttcggattactttcaaagttttttggttggctcttcttatcttaagcttccattcactaaaaataatgggttcaccgttttccaattccttcgttaaaaaattcccctgtacaatattctttgaaataatatattgtgccgctttatatattttatcacgaggagatttattatagtcttcagctactgtccggtagtgatcattgtaaatcttatacatattcatgacgcatcgttgagcattatcctctagcaactctatgccataaagagtagctaaagcaaagagtgaataattttcatattgagttaaactagaattatagttcttttttaccatatcaagttttcgctccaatatttctattaaaaatgccccttcaccagctgaaggctccaagaaagtggcttctaaagaattacaagcttctttgactccgggttggtctagcatcatgtttacaattcttcttggagtaaatacttcaccatgcttttgaacacgttgtttactttttgtatatattttttgctcttccgtcaataatactcccctcctatattttttctttggtgatctaaccgtatttattcatatagtgaacgagtcaattaaaaccagagtttgagataacaatttcaactttttatatatttttgctatttatctctattagcatccttttaactattactttcatcaccaccgacgtcaccttcatcggaattatcaacatccttaaaaacggaacgatcaatcatattatttatggacggtttatttgattttaaaaaatcaaaatttttaagtccgttgtctttcatagaaaatttgtcatgttttatattatccaatagcggagttaagctatctttgaatttgcgtatatttttcatatatgaaaattcatatgctttattaatatcactcaaagtcgtagatatcctatctataggtatatcagataaagtcttgttcattaactctgcaactgtttcaatcttaggcaactgggaagatacaccctttatttcaacaacagatttcatcaatgaataaaatacatcttcgtaaataaatgttcccttttgtgatttcttaacatattctatcgcttcttctaaacccctattagatttacttaacagctttttatagttagtgaatccttcgaatgaaatctgtttattatgcatgactttgtttctaatttttcgtattgactcgatatcattttcagcatcttcataattaacatctgagaaataattttcccataaagattttcctttactttcaactaaaagggacattatggtctctttctttatttcttcagggtagctcgaaatattatcgattgttttatttaaaaatttttcatctgaaaatttattcggtcttttatcaaagagaaaagtaatgtattcctgataagtaaattcttctaaacccttttcaattacgtgttgactatccccatgtgatcgccttttaatttctttatattgaccactatctaacgtttcttcagcccaatacataccaaaaacatctgttagtataagatagattaattgtcttattttttgctcgttgtcagatatcaaattataaagcttcccattcatgtattttgaggcttcgtcattggcagtaataatgttaaatttttctctatttttaccttctactattatcttatttaattgacttaaaatctgagcattaacgctattttctccatctatatttaaagataagttagcatattttttattaggggacaattttactttaaagtatacttcgttttgcttatagcatattacatctttagtaaaaaatataccttttatattatgcaatgtatccctaatcttttgaacttcaacattatctttatctttttttgctaaaaataacatctctatttccaagattcataatctccaatcaattctagccccatgatcttgctaaatacttttatgctgcctaattccataacctactattgtcaatccttactacagtgctcatttattcattagatattatatatctcgatgtattattttatcttctatagttctcagataacgttttatactgtatgaatgttctgaggaactcattttcaaaacgtattttgttgatcgtcctttcccaataacttctataagatttttctttagtagaatatcaatgttagttctaaaagtataattatccatttttaacttttcgttggcttcacttctactaataaattggttttcaacaagataaaaaagtagcttttgctgattttcagggtaatgctcaaatgttttagctatatcaactttccaaattcttacaacagttttgtcttgttctcgtatgatctcgggtaatttcagtttatatttagaagcaatgtcaaaaattctcggccccccgctcccggctttttctgaaattccgatacgtcgtaatattgaagacatagtttgatttcgaatattagagactccgccatgtataaactccttgacggtgattcgcattttaccaggatttacaaactcataataatctggataggccgttatttttataggggtttcagaatcataataggcatgcattaaagaatttacaagggcctctctaattgacgttaataattcatttctaaaaggtagccttgcctgggtatcactatcaataacaaattcttctttaattgtgacttttaatttctccaaaacatttctaaaaaagctatatacattaatttgcggatatgtagcatcaccacttgatacacgatcaagccaagcggaggctaaagaagaatctttttcaaaatagtctaattgaaaaccgggaaacctatctgtaatagagttcgttttaccgaaaaaaagtaatccacctgtggttaaataatagttgccatccccttgccggtctttcctcattgctccaatttctattaacatagattcgtaattgtttttcaaatacttttcgttcccagtttgcttgtataattcttctttatatatttctaaatctttttcacatagatcagagaaatcatagtcttttaacaattcattatctgtttgttcttgcgatcctacaattaaagccttatatttttcctgagttaaaagtctatcaccttcaccaaatcgctcaaaagcttgtcttgggttgccgttaatataaataggctttaaatgatatgatgcttcaggtacctcaatcacaactatttgagtttcatgattaatagatataatatctacattctcatcctttattatattgtgactaactttttgagaattattgagcatattaaataaatcattttttattttattaggatcaattactccctctatttgattggttttctcgtctaagccaaatattacagtacctccattagtattcgcaaaagcagaatatgtttcccaaaaagatttcggtactgtgttttttgctttcttatattctaaatttttattctcttttaatttttgcaagtcatctttttccattttgacaccagtttcttgtattattatgctccatacgaagaataaatttcgcacgatttactcacgattaaccacccaataaatagcttaactaccttatttctctattttatgacttgatttatcgcacgatttactcacgattattttgtaatgctttcttacattattataccaaactattttataaagctaataattcaaaattcattgatacaactttttaacaacaaattcttaaattttgcaatctacaaataacatttacttactaaaaagttattttaaagtataaaaaaagccccctgtaagacgtatctgttatggtcagcctacaaatggctaaaccactctagggggaattgaaccttcatgcgcatgatacatttacatgatagttttatcaatcattttctgtgttattttagacttctagaacccctaacctccctccacattcctggacccatgcttgatcacccagaggcattctttgctaggctgtcccttttgccagtcatggataatggagtaaaatttcttagggtcttccttgtagaggtcgttgaggttattggccacacttttttggatatacttgtccttgtcatccttcaagttggataatatttctacataatcattaaagtaatcaagggccaccgtcatcttcttagcccaagggaggcgaattcgtaggcattcactagacagtcgccggacacgctcgtggtcatccaagctccagtcctttaaaatggtgaatgattgttctgggtatttttggaccaagggacgcatgcaaaactccgaggtaaagcgtttggtcagctccttgctgaagtcaatactggcttggaagtagtctggtccgtaaagttctacaaacctccccaccggccacagccaccaaccttccgtaaatgcaccggcattacccctgagttcagggccaagtatttggctaaaaacttctaatgtctcttcatagcccaagtgaatggactgagataaagcccttgccaccaagtcctgcctttgactaaacttcaagtccaggatttttgttttcgttaatttcaaaaattcttctttgtcaaaactgctagtcactgacaatagcttatttgcaaaattttctaagtaagtgtggtcataatagtctttcagtttttttgccatagttactcctcattaatcggtctttctttaatccaaaagcttaacaattttctccaccctacttattcaaacccacccctttttgagctaaatgtttcaagcattcctgtttgtagtctttatcatgttctggatagatgggctggggtaatttactagtttcaagctggtcatagggagagcaggacttgcctctgtaatagggatctttccatttttgatcaacatggtagcctctgttttccatcaccaaacaatgatacgggtataacttataggggctgtgttcaaaaacctactgtacagtagcgtaaggtcggccccagcctttgccccgtaagccacaacattctctgtgttgccctaggagttgctgcctaggcaagcggtttatgaagtcttggtaccagagtctcaattggccagctcttaaacttgctattaccaatctattatatacttaaaaaaccaacaaaactaaccgtttatgtaataaggtctacgggacctggctccaaataaaggctggcccttttaaatggctgacaggtttcatagaccttgaatatataggggttctacttcatttgacaaagagcctttgaatttatttttataagaaataacccctcagattcaacatatagcttagtctcttttaaaaatttatcgttttcagagtaaatagtagtatcaaaccctgaaccaatagttataacgctatttttagatgggatataaacattcagatgagttttccctttaattatgactaactctaatgctgtactgatttcatctaaccctttgtctctaaaatttagatactcatattcttcaaatcttttaagcggattgtcttcataaaattctgttagatatacaattgaatcatagtaacaaataatcctaaataatatttttttatactgtcacaatactcatgtaaatattccctttcaaaatactcttgtaaatgatcaaaatcactttcataagggtagatatttaaaaatggactgataatataccaagaatctaagttaaatagtctttctattttttctaaattttctttttcaatcacttgcctaaacccttcccgttaccatccaaagatgctcttcttctaccacttctatctttcaatttccatttacttcctttgtgtcttgctgtatttttgtcaatactccaagcataccaactaactatagactttgattaacagaaatcattttatttcttggattcccatctgtttaaagaagtcataaagttcatctaagtaatcaaattcaggaatataaatatagataccctttcgacttctggacaagagtacccggtaaatattttcaacaattgtagggaaattctcaaattgttgatttctcttatcatttttaactgaatctgcaataacccattgattatttttcaagtaataatctccgccaaaagttacgattggccactcagattctaagccttggctttgaaactcagttgctgcacgcttgagtttgtgagccgtcttcaaataccaattaactgattgcttattatataattggtcaacatcctgtccagggaaaatgtttttaaaattccatttaggtacctttgaggaaatatagagtcccacatggtcattggggaatgcatctttcgtcttctgcgcaattcttggtaagatctggggattgcggatcaaacgagccttgaaccccgctttgaagatttcaataaatgctttttgtgctccttcaagatcggccgttagtatattatcaatccagggcacaatattaataaaatcattgcggatggatacgtctaaaaataagtcatcattaatttgataatttgccctttggaattctgactcatagctcttgggtataaagacattccagtcttgcctatcttttaccacctcatgccatagagccatccccttttcttcaccagtataaattgcttgaccgtctccgataaggcaaatcaagctaacttgctggtgttggttaaatattctgtctgcaatatcaagcaaaactttaggttcgcttttcccatactccttatttcgtttatcatcccaggcacgttgggcttcatcaaagacaatcaactggttatccgactgcttggtatactcaagtccagaattatttgcatgatactcacttataaattggtgcattttccttattgcactgctaccctcatttaatccagaggtcgataacaatttttgcaagacgtctacaagtggcccgtttcctgaaagaaaaatggggtttaaactactttcaagatagtcatacaccgatttcaagcctactaacgttttgccagaacccgggacaccactaataaaaatgagattcttctggccttgacccctattaacgatattcctaatagcctccagagcctcactaatatcactttcttcaatgcgcttaatctgtggcaatcttccagaatcaaataaatcttttgtcgctttaactagactttctaaaggctggtattttgatcctagccatttctcaacatcagtatatgcactttgtccgagcaattctttagtcatttctctagaaaaattttccgctgttaggatggcaatactacggtccttgtagggccttacatcgtccagtgtatataccacatacgaatgaacgatcaattgatggtctgcggtttcatagtggtaattttctatgtttttccggtagttaatagcttgctccagatctttcggagtgacatcattttttcgtttaaattctagaattaagaccttattgcgacttagtaaaatgacatccggtcttctacctccttcaaggggcaacatgtattcaaaaataatagatagttctggagcaagctgactgaaaggcaggtgccgctttaaaaaatcaaagcagtcattccaggaaatgatctgtgattctttattatcataacctttgttagtcatcaaagttttgatcttcttgcgaaagtccgctttattttctgcttgaaaagacctcaaactataaaccaaattatccatagcaatctcccattccttttcgtaagaggactattcatagtatgcttttaattcctcaaatgatatttctagtccaacttgggccaaggcagcttgtctgtcttcatacaattttttcaaaaggggaattttatcttccatttttccataatgaagcaaattatggcaatgactacataaagagacaatgttttccatcacatcaagactgtacttggtataatcaaaatcacgatattgactgataggaataagatggtgaggttcagtataccccttattattttttcttaaaaaaatcctgtcattcggattaaattcgcactgatagcctgctctttgcaaggcagctgctgcaactttaggattacgctttggcttttgtctttcttcaaaagaagcagttgtcatttcttgagctctttgctctcccgtccactctggtactacatcagcttcattgtctactaaattatctattacctgcttttcaaccacgtcatactctgattctttttctccaattatatcttgcagagccctttttaacaccctgacagcttcttcagagttttgtatttttatcgcttcttctaaaaaataaatagcatggtcttcatccagtaagcacatatattgctgtttgcctcttccatctttcagaaaagcactatttggtctataattttcaattagccactctctatggttactgagtttcagaggctgatctaagtctttatacaaggtgttcaccatatagccttgcttgtcccacagattttcttcggctgtcgtatagtcaggtctatcagcttcataacaatccgtttgagctatactgattgacttaatcatttgattagctgagtggactataaaatcttctttttttatataagtcatattggtaaaacctctatttttacctccacgcttgttcaactgtggagaccaaacgaatccacccttacgttcatcatcataggttgtaccctggaatacaaaaaacactgacatttatctaaaactccttaccatctttttaatcattatacaataaaaaagagacaaaacgatctgtaaaccttccttggtatcgttatgtatcttttctactttaggcttctagattacccatttcccttcggcggtgatagcttttggatattttatttttctactaaaacttaagtcctattcatctgtttgatcaagcaccatcacacactccgcatggctcgagtggtcagtattgataaaatttaaatttttaggaaagcctcgttcttgggaatatatctactccttttattctttcttcttcactacctattaatactgaatattttaagatatcagggtgggaccacccttctatctcttctttccaagtatatctagcaactcttaatggtactatgattaaaactttagaaattgcaaaagcatcaaaaaataaatcttttatagccattaggcctataaccgtcttatctaaacccatatctagtaaaagtgacgattttctattttcttttataaattcagtaggatagttttgatatttacgtagagtgtattccaagttgtcatcttcgattctctttattatttcatcaatattttctttaaaatcaagaacataaaccttaaaatttaattttttaaatggcttatcctttttttgaattggtcttggttctcttccaggtctttttgtttcaataaattcaatctttgcttttggcagaagtattatcctatctggtattcctgtcattgatggggatgtaaatttaagacaaagccctctattcacttttatcttatcaactaaacttgattctatcaccttttcttacattgatatttcaagctttatagttattgtgtgaagatttctcctataacctttatataaagacaaattttaaatttattactatataaccttcgaaacttgcacaataaccaatttacataaaatcactttttaatttttgtccttgattcttaacaccatctcaaagttttagcccattaaatccattggataaaagtacagaataaaaatcggttgtaaaccttacatagtcactaatttttaaacaatagaccctatattcttgtgaaaaacttctccagatttttcttaataagatgaatcaattgcacaactttcatttaaataaatctataaattttgagtaaagttccttaaatgaattaaaccaaactaccatgaaaaatgaaaggatagaatttgtgaatttatgactatatatttagccaaacaataaattcagaaaaggtatcatcatatttaacatattattaaaaataaggaattaaaaaagcgataaatataaatcaatgataaccttacaaatcgtactaggaagaaatttgaaaacaaacgcaataatcgttgctttcatttattaaaaagacttgacaagataagtttacaaaagtaaacttatcttaagtactaagtctacaattgtaaacaataaggagggaaatacaatgggtgtaatagtatataatactcatatcacagatgctgaatgggaggtcatgcgtgtagtttggtcaaatgatcgagtaactagtaaaaaagtcatctccatattgcaagaaaaaatggactggacgcaatccactatcaaaacgatcttaggtcgattagttggaaaaggcgtactaaatacagagcgagaaggtagaaagtttatttacactgccaatattgaagagaaagaagccgtaagggattatgcagaagatatttttaaccgtatttgcaaaaagaaagtcggaaatgtaataggaagcatcattgaagatcatgtcttaagcttcgatgatatagatcgactagaaaaaatattagagatgaaaaaatctttcgcagtagaagaagtggattgcaattgtccagaaggacaatgtgaatgcaatttacatcataagggagaataaggaggaattaaaaatgaagaataacaataaacactcatcccacagtcaccataatcatggcgacatgaatcactcaaaacatgagcatgtaagcacggaagaacatagagaccataataaggatcaacatcacgaccatcatgctggccatgaccacggtgggcacagtgggcatgagcatcatcatggaaactttaaggaacttttcttaaagtcattgccactaggaatcattattatgctcttatcccctatggctgggtttgacctaccattccagtttacttttccatattctgatattgtagtagctattttatctactatattaattatttatggtggacgtccattctatcaaggggcagttgacgaatttaaacaaaaagaacctggaatgatggctctcgtttctttaggtttaagtgtttcatatttatatagtatttatactgtaatagcaagctacgtaacaggtgaacaaattatggattttttctttgaatttgcttcattactattaatcatgctattaggtcactggattgagatgaaagctattggagaagcaggagatgcacaagaagaactggctaagctagtaccaaaagatgctcacgttgtgttagaagatgattcaattgaaacacgaccagttgctgacttaaaggtaggtgatttaattcgagttcaagctggagaaaatgtgccagcagatggaactatcgagcgtggagaatcacgtctaaatgaagctcttttgactggggaatctaaatcaattaaaaaaggtcctggcgatgaagtgattgggggctcaacaaatggggaaggggttctttatattaaagtacttgagacaggtgataagtcctttatatctcaagtacagaatctaattagccaagctcaaagtcagccttctagagcagaaaatattgctcaaaaggttgcagggtggctgttctatattgcggtaactgtcgcactaatagcttttgtagtatggacgcttatagcggacatcccaacgtcagtaaaatttgctatcacaacattagttatagcttgtcctcacgccttgggtctagcaattccattggtcaccgctcgtagcacaagcttaggggcaagtcgtggcttactagtaaaagaccgagaatccttagaaatagctcaaggtgcagatgtgatgattttagataagacaggtactttaacaacaggtgagtttaaagtattagatgttgaactttttaatgaaaaatatacaaaagaagaaatcattgccttactggcaggtattgaaggaggatctagccaccctattgctcaatcaattataagcttcgctgaccaagaaggtgtaagtccagtatcctttgatttcattgatgtaatttccggtgctggcgtagaaggtaaagccaatgggcaccgataccaattagtcagtcaaaaagcatatggacgtaatctagatatggatattccaaaaggagcaaccctcagtgtcttagtagaaaatgatgaagctattggtgctgtagccttaggagacaaattaaaagcaacaagtaaagatttaattgaagctcttaaaaataacaatatagagccgattatggcaacaggtgataatgaaaaagcagctcaaggcgcggcagaagatttagggattgaatatagatcaaatcaatctccacaagacaaatatgaattagttaaaacacttaaagatgaaggaaagaaagttatcatggtaggtgacggtgtcaatgatgccccttctcttgccttggcagacgttggtatagctgttggtgctgggactcaagttgcattggattcagctgatgtcatcttgactcaatctgatccaggagatattgaatcatttattgaattagcacacaaaacaactcgtaaaatgaaacaaaatctcttttggggagctggttataactttatagctatccctctagctgcaggaattttggctcctattggtatcacattaagccctgcattaggagcaattctaatgtctgtgtcaacagtcatcgtcgccattaatgctattttattaagtttagatccaaaaaataacggttaacagatcgaatgattgaaactccttaaagtatcaagatacaatagttttacaggaaaaaaagagatgtaagtactggctctttgtaaaatcgtgttggtagaagtagacgatttttctaccaacacgatttttaatttattatagaactgatttcttttaaaatcctaaaagccacctattcaacaattttataacttgttattctattttcttgtcatcaataccaccgtctccacatggtgggtctgtggaaacatgtcaatcggctggacttggctaagctggtagtttgcctctgtgaatttgttgaggtcgcgggctaaagttcccggattgcaagaaatatagatgatttggcggggtctaacttgtatggcagcttcgataaaagcagaatctaaacccttgcgtggtgggtcgacaaaaattaaatcagcatgcatgcctatcttggcttggtctaccagccatttttctgccttgacctggacgaagtggacatttttaatttggttcaggtctgcatttttaatggcatctgaaacagcttgaggcaccacttctaccccataaacctggtctgcctctttggcaagagatagggtcaaggtgccgatcccacaataagcatccacaatttggtcaccagcttggatatcagccagatcaatggctgttcgatagagggcctccgtttgcttagaattcacttggaaaaaggactggtgggaaatattgaattccaggttcaataccctgtcccggtaactgtcctgtctgtaaaggacttgggacttgcgaccaaggaccaggttggttttcttagggttgatattttgaacgacagaaaccagctgagctacggttgcctccaagtcccctacaatttcctgcttgtgggggagcttgggtgttcgggtcaccaataccaccatgatatcaccggtaaagtgtccccgtctaaccaagatatgacgaatatggccggtatttttccggtcatcatatgctttaatcccgtatttttctaaagtttgccggacttggatgatggtttggtcaataaccggatcttgaatgaggaagtcttctatgggaataaggtcgtgactctttttgcgaaaagctccggtcaccaaatgcccctggttgtctgccctaactggtacttgggccttgttgcggtagcggtatggactctccatgcctagggtctcttggacttggacttctgtcaagttaccgatcttgcggagggcattttctacctggccttgcttaaacttcagctgggcaggataggacatatgggccaaatccatggtccctgtttgagcgtaaactgggtcttgaataggtacccggtccggacttgcttggtggatatcagtcagtctcccttgagcaaaactctttcctgacttgaacaccttgaaagtgacctcttcgccttccatagcgccttcaatgaaaataggatatccctcaatcttagccacgccccaaccttcatgggtgtaatcttcgacgacagcgcggtaattttgatttttctcaacaggaatatttcttttcgacatgctttcacctaaccttgtttatttagtgtgggtagacggggcttggttcaaatggatggaagttaattttagaatctatttaatcgggcgagtcgtgatcaagtagtttggaattgaaaatcagtctagctcaaaagctcgtctgccttagataaaatattcaggccacatttgatagctgatctgtgataaaataacaattgatataattctattattgttttgcgattatagaaattcatagctataattctacaattactctgcgattatagaacttcacagccataattctacaattgctccataattatagaactttcgacctaacaagatttacaacaaacactcctccaccttggtcaagcaaactttataggatcttgtctgactggcaactaaaatggcggaagaatcgagactcgaacatctgtctagacacccctaaccaacaactgaatggtggaagcgtccgagtctgtggctcaataatcgtccgactgacctcaacgctcagctatagcatcaacctaggcaaccaaacaagacaaaagcaacttcggcgagtggtccaacagctcgccaaaagttgctttttctattagtcatggtctgggtcattactatcgatatagtccagggattctaagacctggttggtgagttctttttctagctggacttcttgtgggctcttaatcgaagtccgggcttggatagcctctgtgtctgccacaaatgaaatgtgttgttggacacattcaaaaaaaactggggcatgcccacctaactccccatctaggttgatcaggagcttgtggtcgttttgacagtcgatccggacactgttggttttggtatagataatctgggggtcatgaatgtgcttgccccctcggagtaatttccgggccaggtcagtcagttccacaaggttggaggtcgtcacaataattaaagtgaacttgccatcccccatcacggtgtcgggagcaattttttcgaaaccgccaaccgaattggtgagggtaacaaagacgaccgaagcttccccatcatagattccatcgtcgtattcaatcttgagcggagtcccgttcaagcggggtagcatttcagcccctttgaggaagtaggctaaagagccaaacatggatttctgctgggaggagacttcgtaggttaattcggtcatggacccggctgcagctatattcataaagtacttgcttttaggtccatcatctgtttctaaactggcttggccaatatccatcaagatgctatcatctttttggatcaccttagcggccttaaccaagttgtcccgaggaatccgcaaggctcgggcaaagtcattggtggtcccggctggcaaaatggccaagcggggtctgacagggagtttagcaataccggttactacctcgttaatggtcccatcaccgccagcagctacaattaagtcgaagccttcctgcccacaccttctagcttctttcatggctgaaaaaggttccgggctggtctggaagcaagaagtttcgtaacccgcttcttcatagacttgaaggagcttgggcaagtgtttttggacctgctccctacccgacttgggattataaattaacctcgctcttttggtcatttgggatcctcctcccaagtaaacttagcgtttgtttagctcctggtcgagcaactggttgaccacttgtgggttggccttgccacgggtttctttcataacttggccaactaagaagcctttcgcccggtccttaccagccttgaagtcttcaatggattgttggttctggtctaaaatgtcgttaataatcggctctaattgagcagggtcagatagttggacccaacccttttcttcgactagagcttggacatcggagctaccttctttgatcaagacaaggtagacttttttaccgattttagaagaaatagtatcttggtcaattaattggatcatttccgctagtgattctggggtcagttgggtatcggacaattcgacattttccttgttcaagtaagccgaaatgtcccccatcaaccagttggctgcttgtttgggatcagctccagcttcgacagtttggttaaagaagtctgacatttccttgctggcagttaggacttcggcatcgtattctgaaatgcccaagtcatttacataacgtttacggcggtcttccgcaaattcaggcagggagtctcgaatggagtccacccagtcatcactgatggaaagaggggggaggtctgcttcaggcaggtaacggtagtctgccatctcttctttaatccgcatcagccgggtttggcctgaatcttcatcataacgacgggtttgctggcggatcagcttaccggctaagagttctttttcctgacgtttgacttcttcgataagccccttgcggacattgttaaaggagttcaagttcttgagctcggtcttggttccaaactcttcttggccaaagggtcttaaggaaacattggcatcacaccgcatggatccttcttccattttaacatctgataccccggtgtactggataatttgcttcaatttttccaaataagcgtaggcttcttggggtgagcggatgtccggttcagaaacgatctcaatcaagggagtcccttgccggttgaggtcgacatacgagtaaccgtcctcgccgtgggtatttttcccagcatcttcttctaagtggacccgttcaatccgaatggccttgtgttcgccgtcgacttcaatatcgatgtggccatcgtgaccaattggccgctccgattgagaaacttggtaggctttagggttgtctgggtagaagtagtgcttacggtcaaaccgggtttcttggtggatatcacaatttaaggctaaagctgccttaatcccgtattcaatagctcccttattgattgtcggcaaggtacctgggtaggcccagtcaatttcattggtattctcgtttggaactgcaccaaagtgggccggtgcaggtgagaatattttggagttggtttttaactcaacgtggacttctaatccaataactgtttcaaaattcatccttacttgcctccttcaaagctgggtgtgtgggtgtggtggccggtcgcttgttcgtaggcataagctacttggtaaagtagtctttcttcgaagtggttgccgatcaactgcaaaccaattggcataccgtcgacaaagccacatgggatggacatggcaggaataccagccaggttgaccgaaacagtaaaggtgtcttgcttgtacaagctgagaggatcttcaattttcccaccgatgtcaaaggctggggtcaaggtggttggggtcaaaataacgtctaccccttcaaaagcttttttaaagtcttctttaatcagggttcggaccttggctgccttgtcaaagtggtcttcggcatagccagcagacaaggagaaagtccctaacatgattcgtcgtttaacctcttcaccaaagccttcagaccggctcttaatgtaaagttcatccaggtctttaaattcctctgtccggtaaccgtatttcaccccgtcaaagcgttgcaagttactagctgcctctgaagaagcaataatgtaataggttggggtcccgtacaaggcatggtctaagtcaatttcaactaactcagcacctagggcctggtacttggccaaggcatcttcgatgacatccataacctggtcatttaaggcagagtctctaaataatttgcggggaacaccaattttgagaccggcaaccccgtcttcaatcccttgggtaaagtcaacttgactttcaggataggaagttgcatcttgagggtcatggccactgatcgcatttaagaccaaggcattgtctttgacagtccgggtcaaggggccgatttggtctagactggaagcaaaagcaattagaccgaagcgggagacccggccgtaagttggtttcatcccaacaattccgttaaaggcagcaggttggcggatagacccccctgtgtcggtccccaaggaagctgggaggaaaccagcggcaactgcagcagctgaaccaccggatgacccaccgggaaccttgtttaaattccaagggttgcggcaaattttaaagtaggagttttcattggaactccccatggcaaattcatccaggtttaacttgcctaaggaaatcataccagcttccttcaagcgtttgacgaccgttgcgtcatagaccgaatggaagtcctctagcatcttggaagcagctgtagtcggctggtctttggtgacaatattgtctttaaccccaattggcaggccggacaagatattagctgggtcaatccctgcttgatcagcttccttggcttgggctagggcctggtccttgtttaagtgtaggaaggctcccaagtcaccgtcaaattggtcaatccggtcatacaagtcttgaacaatcgcctcagcacttgtttccttgttgactagggcttggtggagttcttccagtgttttgtaagcaaatgtcattaagccttgcctccttgtcggtctactaataatggaacttggataaagttgtctttccggtcaggtgcattttccaagagttgttcaggcacatcagacttcactggcttgtcctctcttaaaacggtggtgaggtcattgccattatatgttggttgcacgcctgaaacatcgaccttgtctaagctttccacgaagtcgatgattttctgcatttccttcaacatctcttcttccttggaatcatcatactctaacttagccagggccaagctttggaataaggcacttctatcaattgccattcttcgcttcctcctcaaatcattctggttgcttaatcaaatatgtggctgacaaattcattctggttggattcacggaccaagatggcctccaccccgtcgagggattcgaccacaatttggatccggatgttctctggtaggtaggtcatagcagctgtattgagataataggtaaaagccgccatctctcccctgccgtagaattgggtcgtaatttggatgtgtaaatcggccaatatctcattaatgtagtgggcccggccaacgactccgttcaagtttgggaaaaaagactccacttgggactggaagttcttaaagctattgacttccggactttcgcctccttgtactggaaagactaggcgttcttcatctacttcttcccatccagctacatcaggtccgccttggctgaggcctttttggatataggtaccaccggacaagtcatccttggctgcctgctcaaaaattcctaccatgatcggcaagtcatccccaatatcttcatgatctctgaccttggccactattttatctgccatctcttgtccttggtcgattaaggtctggcggtcaatctcttggtcagtatcagtctcgctgtcttctggattcatggcaagaccgatgctcatcccggccagttgataattaccgtcttcattaacttggtaaaaatcatgctctaaaactgaattcaagtagcggggttggtcctcatctccaggattgagtccttcggggttgtcttctgactcccggtccagccaagtttggaccatgtcagaggaaatgtactgaccttcttggaagtaatggtcttcaactgtgaaataatcttgggctaggcggattaagtcatcttcgaacaacttcatgttgatattggaattcaagcgggatgttgtcccccggttttggctgaccgggtagttgccctcttgatcgatcaagggctggtaatattgggcctctcccaattgttggatggccttatcttcttcaatcacttggtcttcgcttgaagttgactccccgccttcctctccttcagggataatattgcaggcagttaagagggtcaagctcatggctgccaccatcatcttaactaattttgccctcttcattgcttccctcactttctgaaactagtttaactcttctagtagttggtcctcatcccaggtctctactcctaattcctgggccttgtccagcttagacccagcatctgatccagctatgaccaagtcggtatttttagacacactgccggtcacattggcccctagttcagtcaggatctctttgagttcattccgattgaactggcttagcttaccggttaggacaatggtcttgccggcaaagacctgggttgattcagacaggtcattttcttctaaggaccgggctggaatatagtccatattgaggccggcctgagcgaacttgtcgattaaggcctgactttcttctagtttaaagtattccaccaggctatcagcaatcacttggcccatgccatcaatttgggttaggtcttggacgcttgcttcccgcacccggtccatggtcttgaattcttcagctattagccgggctgccttggacccaacatggcggatgcccaagccaaagagtaaacgctccaaggagttggatttggagttttcaatggcatccagtagcttgctggctgacttgtcgccaacccggtctaaggccattaagtcttcttttttgaggtagtagaggtccccagtatcttggactaagtcctggttaaataattgctcaatcaatttttgtcccaagccatctatattcatggcattgcgggagacaaagtggttggctttttccaagacctgggccgggcattgggggttcatacatcggagggccacttcgtcttctaggtggactaattctccttggcaaactgggcatttagtcggtatggggtagggcttgctatcctctggtctttgatctaagtctacccggaccacttctgggataatatcccccgccttgcggaccaccaccgtgtcttttagccgaacatctttttccttgatcaagtcggcattgtggaggctggcccgtttgaccgtggtcccggccaattggactgggtccatcacggcagttggggtgacgacccctgtccggcccaaggtccattcaatgtcgtgcaatttggtatgggcttcttctgctggaaacttgtaggcaatcgcccacttgggggccttgacggtgtagccaatctcttcttgagccttaaagtcattgaccttgatgaccactccgtcaatctcataagccaagctggatcttttggcctgaaagttttcgatgtagtcaatgactttttccatactagagtaaaccttgcgttcaggattggtccggaggccgatggaggtaaggtagtccagagactggtcttgctggtcaatggttaaagattcctggctgaccaggccgtaaaggaagacattgagctgccgcttagctgttaccttgggatctaaattacgcaaggtgccggcagccgcattcctgggattggcaaagagggcctgcccctcttcttcccggccttggttgagctttaagaagcttcctttgggcatatagacctcacccctggcctccaggctaatggcttcttgcaaccttagggggatggcttggatagccttgatattggccgtgatgtcttcaccgatattcccatcaccccgggtggcaccctgaactagccgaccttggtcatattttaaggatactgctaggccgtcaatcttaagctcaacttcgtattcaatatctaagtcggttaggctccgaactctgcgatcaaagtccaacaagtctttccggttaaaggcattggccaagcttaacatgggggtgtcatggctgaccttattaaagccttccgctaattgatctcccacacgttgggtaggagaatcttcttggattaaatcagggtaggcgccttcaaggtcttccagctcccggtagagtttgtcatagacctcatcttggacagtcggttggtccaaggcataatactcataagcatattggtttaattctggaatcagttggtcaatccgctctctagcttcatcttttgcaagcgtcatcctttatcctctccctaaatcttttcgatgggggcaaaactggctagcaagggcttgatcccttcatctggaaaggcaatgttgagctggaggtccgagccagaacctttaatctcaataatggttccttggccccattttttgtggtggaccttgtcaccaacttcccagtcttctttttcagccccagtcgccccaactgattgctgagaccaagcattagccttataaccactggctttgcggcctcctagtctagggctaactttccccccagtctggctaagagacccagttgtagcaccaaggtcttggaccaggtcagaagaaatttcagataaaaagcgagatttgggattagcctgggtccggccatagagttggcgcatcatggcacgggttaggtagagggcctgctcagcccgggtaatccctacataggccagtcgtcgctcttcttccaagctttccgggtcttcagccgcccgggacaaggggaagattccctcttccataccagcgataaagacataggggaattccaaccccttggctgcatggagggtcatcatggtgacctggccccgaccctcttcaacatcatcagctggtgacaataaggaaaggtcagttaagaaggctaagagtgacttgttgtcgtcttcttgctggtcaaattcctgggtgacggagtaaaattcctgtaggttctctaaccttgcctgagattcaagagtccggtctttttctaaggctttttggtagccagtatcctctaagattttttcggtcaaatcagtaatcggtaagtattccgtcattttcctgaaattttcaatcatttgactgaagtctaatagtctgttgacagcccgactaggcaggttggtagcatccgcattgagagctgtttcgtaaagcgaccaacccatctcctggccagcctggcgtaacttgtccagggtgccgggtccaatccctcttttgggctcattaacgatccgtgaaaaggacaggtcatcagctgggttagccactagggttaggtaggcaatcaggtcacggatttcttttctttggtaaaagccggttccgccgacgatcttgtaggggatattcgacttgataaaggtttcttcaataacccgggacatggcattggtccggtagaggatggcgatgtccccatagccagcctttttgccttctgttaggtcatggatggtccctacgataaactgggcttcatcctgctcgctccgggcagcgtataagctgaccttgtccccctcatcgttggcagtccacaaattcttgtcccggcggttgatattgttttggataacatcattggctgccctgattatagacttggttgaccggtaattttgttccaaaaagatggtttgggcttctggatagtctttttcgaaattcaaaatatttcccatatcagccccccgccaaccataaatagactggtcagcatctcccacgacgcaaacatttttaaagcgttgggctagcagttgaaccagttggtattgggcttggttggtatcctggtattcgtcaacatggatatactggaacttggcctggtagtaagacagggtatcgggcttttccttgaagagacggacggtttgcataatcaggtcgtcaaagtccatggcctcagactggcggagctgtctttggtaagcatcgtagcagtcagccaccacttccttaaaatagtcatcagcttgtttccggtaggtttgctcatccaagaggtcatttttggcattggaaatctcggccaatatcgccttggggttgtaacgtttaggatcaatattcaagtcttttaagacctgcttcatcaaacttttctgttcactagggtcagcaatggtgaaggcacggttatagccaatttggtccccgtcccttcttagaatgcgaacacacatagagtggaaagtcgagacccaaactccagatcctccctggctaaccagtttctggacccggtctttcatctcgccagccgccttgttggtaaaggtgatggctaagatattccaaggattaacccctttttcttggatcaagtaagctatccggtgggttaagacccgggtcttgccagatcctgccccagccatgatcaagagagggccatcagtggtcatgaccgcttgtttttgtttgtcattcattttgcctaaaatatcttttgctaggcccatgcaagtcttcctttcacgtaatcatgctttctcattatacaccaaaataaaggttagtttctacctcgactggttctttctcctataaaatttggccttcttgctcgtctttttgaccaagactaagaagaaaaaaccaatgaactaggtcattggtttttgctaaaaggttacacaccttgaataacgttcatattaagctggttaaacaagatccgaagctcccgtctgacataagggtagttattgtcttccagatagtcaatcacaaactggtaatgcttgagtttcttgtcccggctggcctggataatggatttcaagtgaccagtcttgggcaggatataccgcaaagtgtctagcatcatccctcgcatgtagctattgcggcagtattgcagaagatcatgccaaaagtccacttccctgtcttcgaagaggtcctggtcaccaaacttatcatcagccatcttatcataagtttctttcaggccgtccgtgtcaaagtcgacctcatctaactctagggtttggaagtggtagctaaccagaacttccaagaaattggtcctctcctgaaaggcagaagagtcaatttcgggctctagaatctctgcccccttgtaggggacaatttttaagattccatctgcttccaagcgtttaaaggcccctctgatcggcgtccggctgatgtctaaggccttggcaacatccatttctttaatatgctgtttgggtagccaatccttggccttgatcttgtcttctacaaagtcataaacggtctgctctaaagctttctttttacccatagcaagtatccttttccctttatttttagccttgcttttggcaagggaagcggactttaatccggcttactctttagtgtaacagaaaattaaagacttggctccccttcaattttttcccggtacttgtccatttttttactaaagagctccccgttcgaaggcggggtgtaggtaatcgcgttggcgccggcatcgatcgtctcttggatgtcttcatctgtcggaccaccagtagcgataatcgggacatctgagaatttttcccggattttcccaaccacttcagccgttttattggcacaggagacatttaaaatatcaaccccggccttaaggttggcttcaatgtccgtatgttccgatacaatggtcttgataattgggctgtctactacctcatcgaccaaacggatggtatccagttgggttggagcattcaaaaccaccgcggtacagccattggcttcagcaaagagggccatgtctttagaccgctgtcccttggtcaaaccacccccgaccccggctaagactgggagattggaagtggaagcaatggcttcaatgatggctggatggggggtgaaaggatagacggctaagatggcatcggcattattatttaagataatcgcaatatcagtggtgaaaagaatggacttaatccgccgtcccataattttgataccagaagcattccggatcttgtcagggactttaatatagtccttgcgtaggttggtggttatttcgggaatttgttttcgcttttttacgacatgttcagtcatttttttacttccttcctctatccctatcatcctatgatgatagatggtcatattggtcaagttggtaacgctcaatcagattaatcaatttttgagcatagttggggtcagtggcataaccggcttcttggagggcataggcagcgcttttatagtcaggtgcttggatgactccttggtagagcttggggtcccaagaagttccataagccagtaaacgagcatggtccaacattgattcttccagcgaatcataaaccttaaaaggctctttttggtcttcccactggcctttgtattctttggtcatgtaataaaccccatcctgggagtctttccggccaaaatagttgttttcctgcttagccaagtcactctcgccccaatcggattccaaaattgcttgggaaatcatgatactgggcaggaccccatattcttcctggagggcttgggagcctggaaccattgcttggataaaggcctggtcagctggcaagggtgcctcatctgatccttttgggccactgaatcccagagcatggcccaagtaaacaaaggcaaagatcaaaaccaaagtcaggcttagcaaaaaggccaggaaagctcgatcttttgccttacccttcttttttcgttcttgatagcttgacatgactttcccccagtcctttcttgactcatttattttaacgatagtgacataaaaatgtccacctaaaaccctacttttaggtggacaaatttttattttttagcttttaaacaaaactgagcggactttgctgctaaatcaacttgcttgtctttagctcaaagcctctaccatatcaatgcttttcagcttgaagtgcatgataaccatgacaataatggagaagatcaccatgagtcctgctgagtagaggtagcttggccataagatagtccggctaaacataatgtagtttagctcgacggtttcgataatatattggtgcaagaagaaaccgaagattagtccgaccaaaatacccatgatggatagggtaaaggtttcgcggtaaacatagcgggtgacttccatatcaaagaaacctaaaaccttgatggtggagagttcttcaacccgttcgctgacattgatgttagtgacgttgtagaggacgacaaaggctaggatggcagcagataggatcaagacaaccatcacagtggagagggccgatagggagtcctcgaccgtttgcaagttctcggtcattaagttaaccgctaaagtggcatccaggtcaactaactggtcttcaaattctccttcagcttctgcagtgacctcagcattttgatcatagcgaatcaggcgggtgtcaaagtcataatcttcatctgagacagtcttccagtattcggggctaacgtagacatagtgggccacgtagttgttgacaataccggctacttccacttcatattcttggttttcatagtcttccaagatgaaggtatcaccgatggaaatatcttctaactcggctattttctgggtgaccaaggccccgtcctcaggtaaagccagtctttcatcggtatcgtagtcttggagttccatatagtcttctagttcttcagcactttccgggatcatcaaactaagctcttggtcagtttggtcatcttgtagggtcatggtttgagttgagacccggataaagtcctcggttaagtctgaatcggaaatagtatcttcgacttcatcaacctggtcttcttcggcattggtgtccacaactgaaatagcgtcgtagttggaaatttcattaaactgcaattcaccaatcccttgaatggagtcatataggccaaaaccggtcagcatcaaagccaccccaccggcaaccccgatgatggtcataaacaaacgacccttgtagcggaagaggttacggacagaaactttttggataaaaccaagtcggtcccaaatccatgaaattcgctcaaggaagatgcgttgaccactcttcggtgctttagggcgcaagagggaagccgcgttttctttgagcatggaccgcaaggaggcaaaggtagcaatactggttgctaaaactgcacctacaaaggcaatggcagcaatgccaggatagaaggaaatctgagcgtcaataagctggtaggccgcttcataggcattgacaataacggttgggaacaaccagaagccaagagggagaccgataactccacctaggacggtcgctaagagggcataagtgaaatacttagcagaaatttgagtattattataacccaaagccttcatggtcccgatctgggttcgtccctcattgacaatacgagacatggtagtgagggaaattaagatggctaaagcaaagaagaaaacagggaagacacgggaaatagcctggattcggtcggcgttctcaccgtactcattgacaccagggaagtcgagagaggtattgtagaacatggaagcattggtctcttcaaattcagccaactcttcttcgccttcttcaagctgagcccgggcatcctctagctcttcttgggcttctgcttcagcttcttcaaattctgctagattgctttcatattcctcttcagcttcttggatctggttttgagcttcttccagctgggcctggccggctaagactagttctgaattaggaccgtaaagggcagccgccgcttgaagttggctttcctggtctcctatttcttccttggcctggtcaagttgagtccttgcttcttccaaggcttgccgaccttcttctagctggtcttcagcttcttgaatttgattacgtccttcatcaagctcttcttgagcctggttgatcatgtcttgctttctttcttccgctcggtcattgaaaacatcttcgtattcttcttggatgtcatcaatttcattctgatagtcttcactgtagacatcgcggccttggctcaattcgtcaaatttcaagtgaactaggttactttcttcgaggtcaatggcgtcttctgtgacgacaccaaaaccttctaaaaccccagcaccaatggctgttgtccctcgagtttcatcttcgacatacataggggtttggacaaaaccgactatttcaaattcctcttcattgacattggctgtgttgtcaaaactagcatctgtttccaggctaaatgtatcgccgatatcaaattcttggaggaagtcatccttactgtctagggcaatttcgtttggctcttccggaagccgtccttctaagacaagatagtcattaagctcatggtcttcactataaccaaacaagcgaaaggcccggttttcgtcatctaagacatccaccgtcttgtgaacgtccactgttgcatcgcggacttggctgaactcgtcaatgtcttcctcggtataaccgaaaggagagataacctgcatatcagccaagttttgttcattatagtaattattagctgtttcgatcatgacggggctagttgccaccaagccggagaaaaaggcaaccccgataaggataatggcaaatatggagataaaccggcttttggtattccatatttccctaagagtatctttgattagggctttattaaacacgcatgatcacctttctaccaagtgcttttaccatgaaatttcatcaaccggtttcggattgtcattgacggtagtgttggttaccttggcatccgcaatttcaattactcggtcagccattttggcgatagcctggttgtgggtgatcacgacaactgttgccccatattcttctttggcctcttccaataatttcaagactttcttgcctgtttcaaagtccaaggcaccagtcggctcatcacagagtaagagcttaggcttcttagctaaggctcgggcaatggctacccgctgctgttccccaccagataattgggctgggaagttgtctcgtctgtgagagagtccgacactttctaaaacttcatcggggtccagggcatcatcggaaatttctgaagagaattcaacattttccttagcggtcaagttagggattaagttgtaggattggaaaataaaaccgacatcatcccgtctgtactgggttagttgcttgtcgtcgtagtcaatgaggttcttgccatctataataacatctccctcatcagctgtgtccatgccccctaaaatgttgaggacggttgttttccctgcaccactgggtccgacgatcactgcatattcattttcttcaatttcaaaagtcatgccgtcattagctgcaattttactgtcacctgagtcaaaatacttatattcatcttttaccgaaataaaggccgtcatcactttcactcatttctatttctaaatttttgttacattaaatatggtataaaataaagctttacatggcaaggatgatgccttataatgtgtctattaaacaacacattatagttatttgtcgtttaatagactaaaacaaaataaactagcccaaaggaggacttatggaccgccgccaagaaaaaaccaagcaagctattttacaagccttgatcgacctgattgacaaaaagggtctggaccaagtcagtgtcagcgacctgtgtcaacaagccaatattagccggtcaaccttctacctccattacaaaaatatggaggacctcttactcagtgtggaggctgactttatcagggaaatcaccgaggccatccaagacttagagacggaagaccttatctacaacagccaggctttgacccaattgtttacccggattctggaatccatcgaaaaaaatagtgatttgattatcaccctgatgagtccgacaacctcccctaggacccggctgaccatcgaacaagccattgaaaatatcataatcgaccggatgaatacggccatcataagagaggcgacccaagaagagctgccagtgagcaagacctatattgcggtcaccatctcttcccttttcacgggtattgtggcggagtggctgcttagtggcaaaaaagaaagccctcaggacctgggccagtttatctctgaagtagcaacccagcctatgattgaccgtgtccttggattggaccagtaaaaatccagcagaaatcatttctgctggatttttgctttttcttaaaaaggggtttttgtcccaaaaccaatttgctcaggcttaactgatatttctagtttagctattcgtccttctgtaaggcaaaaacctttaagtagtggctttcaggaaaagtttcccggaccctgtagtcttgaggcaggccgtactcttccaccaccaacccgtcgcatccggcctggtcaaagccacgttcgatcaacttgtaaaattcatccttgctaacctgccaggcattggtagaagcaatgaggatgccgtcccggtccaaaatactcaagcaatctttgatcacccggctgtagtcttcttccacctgccaggtcccggcatcggtccgggcaaaagttggcgggtctatcacaatgaggccaaaggtcaaatggtgtttttttgcatagtccaagtaagagtcaacatcaatcacccggatttcatgttggtcggggtctagggcgtttaagctaaattgctcagctgttaattttttacttcttttagccacgtcgacattcacagtatggactgccccacccatgctagctgctacagagaaagctcccgtataggagaagaggtttaaaacccgtcgccctggcccaaaccgggtcatcaggtcataacgtaggtccctttggtcaaggaaaatcccagtcatccagccgtcattcaggtaagtggcataagtaaggccattttccttgaccagcaagggctcaggtgcttggtccccctggaggtgttgacttttcactggggcatcaggaaagttatttttctcataaaaacccagtccgtcttggaagacagaagcgatcaagggaaccaacttagaccgaagctggtagaggccctggttgtaccaagagataacataatagcccgcataatagtcaatggtcaaaccgccaatcccgtccccatctccattaaagacccggaaggcattggtgtcactgttggcataaaaagcttgacggtagtccttggctgcttgcaatttctggcggaaaaagtcctggtcaatcttctcgtcctcccaagagaggacccagccactattgcggttttcataacccaggtagccagttgccacataagacttctggggatctaacaagcggacaatatccccttcttgggcacccgccttgtcgtaaaagtctaagtcagtcaaaaccgggtagccgtgtttaatccggttggctgctaagcgttttaagtggacgtcttgcatcccaatcactcttctttccgtctaatcttcttctattataccagcaatttgccggcgcatgccaaatccctggtcggtctccttcatggcaaaaatgtggtgtaagccttgccccacaataaagttgtggtcaatccctagctggcttagtttatcgtggagaaggaggttgtcagggtaaaagatttcctggtcccctacaataatggttaattttcccatccggtgaagttcttgactatataggggactgaccatgggattggtcctattgtctggactttcagcccaaattttcccatactcttggaggacccactgtctcaagtcagggtctagaccttggtagtcggctatatcaggattgtcggttgcaatatccaaccatggagaaatcaggataatatccttgggctggtcgattcctttctgagctaagcggtcagccagacccatgctcagtcctccacctgagctgtctccaatcaagctcacttgtttggcatcttccagactctctaagagctttaagtaaagcttgactaggcggtcttgggaagcacggtagctatattgaggccctttaggataaaggggcatgacaatcttagcccctaattcccgagcccattcactgagacccttaaaatagcggtctttgggctgtttaaagtaagatccaccatggaggtaaaaaatggccttttgtttggggtcttgccggtcattccaaacaaaagtccgcatgggtccatcgtctatgatttctacctgccactggtccaaggcttgggggaccgggaaaggaatggaattggcggcccgccggtgttcaataaaactcttgaaatcttccaaggcgtggatgtcatcactttcggttactttgagcttggcctggcccttctctagcacaagatctccgctttgagaattcttatttttgtcctctttaagcctaggaaaaaatcgtcttaaaaatccttgtatcatcactgactgcctcctacctgccctttaacctagttggtgtttgcctttaaaataaatgcttaaatctagcataccaaaaatttcccttgtctgctttgaggaaatggactcgccccggttgaaacaatgcctttttgattggtcagtttgctgggggggccaagtaccgagttactaggctgctagagggcttgacatagggtctaagccactatctacggacaatcattcttaaccatactggtagacttattttttgtaccttatctggcatgctatcttctctgatttctccatatcgagtaggagactagccattaattggctagtcgacctctcacaccaccgtgcgtacggttccgtacacggcggttcaatatcttgcgtaagcagactcagcgatagtgcttagtggaactaagccccacttgctgagtctttctgttgttattgcacgatgaaattcatgtgtgcatgacagtcgccagtactttttgcgtgaatacgcaatccgtttggctgaatctaagtccagtccatattgttccaactttggtataatagttcgtggacgtttccaccgtttaagaatcagctgtctgatacggtgatttaaccattgctcaacttctttgataaagcttttaatgaagcctaaaccaaaataattaatccaaccgcgggtgactcgattaatttcagtcattatctttttaaaagtacctggccgtttacgactggtcagctttctcaatctgcgtttgaatttctgcttggcttctttggtagggataaaacgataatccccattcacttgcttcatcagacagctcaaaaactttaaacgggtaggagacccaacctggcttttgtcttgattgacgattaactttaagtctttttcaataaagcgtgtgatgctgttcattacccgttcaccggctcgttttgatttaacgtagatgacaaagtcatctgcgtatcggacaaatcggtgaccacggttaaccaactctttatccagttcatgtaagtacacattactcaaaagcggtgatagaacaccaccttgtggtgcccctgtttcacttgcgataaattcgctagtcaaatcaattacacccgctctcaaaaacttacggataattttcagtatcattttatcttggatgtactgttcaagataatagataagtttgtcgtgattgagcgtgtcaaagcattgtttgaggtcacaatcaactacaactcgatagccttctttataatactgtgcacattgcttgagagcactgtgcgtgcttttccctggtcggaatccgtgactgttgtcatagaagtgcgggtctataatcggttcaattacttgccgtatggcttgttgaacaactctatcccgcacacaaggtatacctaactttcgtttttctccattcggctttggtatttctactcgtttaactggttgaggcttatacgttccatcaagtaatttcttccgtaagggttgataatacgcttgaatgtgctcctctatctcaaaaacggtcataccgtcaatacctgcagcgcctttgttccgtttaacggctttggctgctgtttccaagtttcttctgtcaacaacttgctccattaagtttggagacttacgatacatttctgtcatttcacctaaagtttactagacgcatcggcttaccctttcggttccacctattctctccaccgattgccaatctcttcgattgttttctgtcctattcgtaaactttaacctccgttctatactttgtatgaatattgttcagtccttcgctacaacgtagctactatgacctcggctgacttctcactattcgttgttactactaaacgctagtgagacctccccgagtaaggtgtgacaaccttccactcatgtcactgcttcatttactgaaagggacttgtgcagtattggactttactttgttatgcaagctcatccatcccaaatcagccttgatatgaagtttctgttcgtcagtgcgagtgtttgcctccagcttccttcagattccacctcacgatggacacccttgccttcagctaacagttcctactgccaggcctgcagtggactttcaccaccaagttgtcacccatgccgggcgcacataaaaagtgttggcaggaatcctgccaacactcaaaacttaaatttgttaatagactaaaagaagaactcctaaaagtttattgctcaacccattcatctggaccagatgcaacatcttgttggaagagttgacccgttctggtattgtaacggaatctattttccgctgtcaaccgttctgggtggtctttgtaaagggttatttctaaggtttcaccgttaatgacttcagtcgtatagacaaaatcaactggtttatattggtagtctgtagcttcgtggattcggtctaaggccgcttgggtatagtctttggggttaaggctttggtagttagtgtctggaatccatcttaattcgtccgcttcaactataatgacgtcaccgggtttgatgagggtatcagctgtaatcccgtttcgggccatcatctcttccatgctgtcgccaaatttggccgcaatgctccagagggaatcacctggttcaacttcataagggccaaggtgagtcggaagataatctggatcttccagcccctgctcttggtaatccttgataccttctttaatcagtaattggtctccaggatggatggtgtcgtttggtccaagattattccattctttaatcttctctacacttgtatttgtttcttgggcaatccgccaaagcccttgttggggcttaaccgtatagtaataatcttgaccacttgcttgactatcagcttgactttggtcttgtccagggtaaatgaccaagctgtcgccaggttggatcacatcatttggacccaagtcattccaagacatcaattgcgagacagtgacattataattttgaccaatacggtagaggttatcactttgttgaacctggtaggtcactgcttggtcagaagaaggatcagcaggatctccattttgactttgggctgcttctatcggacctccagaagcttcaacttgacgaccagtagctagacttgggctaataagaccaaggatgctcgccgatagggcagtacttgctaaaatttttttcatgttcatagccactttacctcctaaaaactattttttagtttcgaataatgatttcgtcaccagggtggattacactatcttcagttaaattgttccaatctaacaattcatctaaactaacaccaaattgttctgaaatactccagagtgagtcacctggttgaacaatatatgtttctgcatcttcagatgctgtttgctccccttcttgttcattagtagtatcggagctactttcccctacaatcaattgatcccctgggtgtatgacagtatcaattgtaataccattccaagataacaattgatcaattgtgatatcaaactgttgtgcaatacttgatagggagtcacctggttgaacagtgtaaacattggaatcatcgcttgtttgatcaggttgatcactaccaccagtgtctggattttctccttgaatgactatacggtctaattcatataactgattatcttcaataatttggattaattttgaagcatatgaagaatctgtggcatatccagcttcttgaagtttattagcaacactgacataatcagtatctcctatcaaactttcatatatagagttttcatacaaaaatctaccatggtcttctatacttgcttcccaactaggataggccctaaactcgtcattaacttcatattgcccttcctctgattcttcaactgtgtctaagttagcactatcaccttcaaaatcgcctttaacaccaaacaaattattatattctaccgctaaagtagaagtaccccaaccactttcgagaatagcttgtgccactgtaatggatggtagcacaccataatcataccaaccttgaatcgcagggcctttaatttcgtcaataaattcctgatggtaatttgcttgatcttcagcttgataggttgtaactgtttggtcaggagcagagcgctgcgtttggctgctatcatagcttgtaactgcttgatcataagcccttgcttgggtttgtccgccttctcttgattgctcaccctgttcgactctatcctgtccttctactggggcagacaatagagaatccgttatttggtagtcttcgtcggtaaaaacatgactagcttcagtttcacttgaataatcttcgttattttcctccccattaatttcttcgttctgattatgggaagtccaaccatcttctatttgacttaaatcatcgtatgattccaatagatctgaactttcatcctcataagattgctcttcttcatcagcagtctcatccaaggagtcaatgtgaccctgatcactagattctgtttgactatgtaagtcatcatactcttgaactagatcatgatcaaaatctgacggatcacttccttcatatggatcttctaaatcttctttaataatgtcgaagttttcattttcttcagtaaaactttctatttgatcactagctgtaacgtaagcagagttttccaaattatcaacttcttctgcatggacttccctatctaaaataagcaaagaagaaagtccagctagcgtactaaggaccaatttacttcttctcattaattattccttctttctatctttcatgctaacaaacacttaatacctagtaaaccttaaggctttaaacattaacatagatttatctgataataggattatctaactttataatgttaaataaatataaaaaaaacggctcttcattttttagcgttggtggtataatatagtcactgttctttttttgaggggcaacttcttaaagttgcccctttttttattgaatgggttgggagctaaagtaaaggcaaatccggtcgaggtaattgccaaggtttcggaagccatatgcaatgcggtttaggactttgattttattatgaataccttcaattttaccgttggtatacggatagtggaaggtgttctcaataaaggggaggtgtttggccaaggttttgaggctgcgtttcatgtagttggataagccttcttggttgacggttaatcgatcttctagcttggccatgtcttggtcttggatggcctgtatcaagtcttgataaagccggtaatgccgttttaaggacggatcataggccaacatttcctgaagaatacccgcttcggttcgttgaccaaagagacggtaaaagtgataggacgtataggataagtcagattctttttttaagaagagcttccaataagctttgagtcgcctctatttcttttgatccgaagagttggatttgagttggttcatgtattgaatccgggtttggttaaacgaccgattgatcaattggactaagtggaagcgatcaatgatgatcttagcttgggggaagagttcacgaatacaagaaacatagccagcattcatgtcaatggtcaccgtttggacctgttgccggtcctttagactgtactggctgataaagtgttgggtgattttatattgggtccgaccggaaacaatacctaagatctgaccggtagcggcatcaatatagtcaaaggccattttccccttcttatatttaaattcatcaaaggataggtgggcaggcaggcttttggggcccttccgtctttctttcgccgctagacgggcaaatcgggcgacggacgaccaagaaatatttaatcgttcggcaatatctttgtatgaaatcgcccggctcgcttcaaaagctaccccagctttcaacggattggcaataaagcaattggcgttgaccaagtgggtcgaagccataaatgttttcccacaggaacggcaataaaagcgttgcttacgaagacataaataaaagggtttgaaggggtgaaagggtaaggtgatcatggattcctgcgtgccatttttgatgatcgtatagttttggttaacgaccccacatttagcacagcagtgtggagtgtaggttaaagaggcatgaagaatcaaggccgcttgtcctttgacttccctttcttcagtcatcggctcctgaaaagaaatgttttcatcttgaatctgaattaaatttcgaatatcatgttggtgaggcaagtgaatttctcctttctttgagttgtggtgactatattgtaaggggaattcacttgtttttctatacataaaagaaaaaaggcgaaaacatcaaataaaaaaatgacgctggtgaatccctcaccaacgtcaaatgttgtagaaccaaaaaaaccgacccagttatactgggtcggtttctaatacagtccaatatcaatctaatattgggctggtcaaaagagttttagaatagttcggttataacttagtcttctttgtttttaccagcgaacaatccaccagctaagcttgatagaccaagtaggcctagtgcccaagttgaagtagctgtgtctggtagagtttgcccagattcttcagcagcttgctggttagaagcttgtgcttgaccagaagcttgtacctgacctgcaggtgcttgaccttggcctgtagcttgagaaccagtttgactagtagcttgtttgctgtcttgaactggagtagctacttgaccttcagaacctttaccaggtttaactggtgcatcttggccaggttcttggcctttagaatcatctgatccatttgtaagttcatccaccaactcgtcccaggttaactcactgtctggtaagaagtcgtagacggattcaacagttgttgaacctttaataccggtattttcctcagttttttcatgagcagtgaatgtcttagtttcttcgtcgtaagaccattcaaggtcgcctaggtcatgttcttcagcccagttttggaagtatgctttagcttcttcaaggcttgatgctttgacagtagtggcaccgtttttacctttggtgttttgagtgatataaacgaaggagtaaacttcttcttgatcgtttttatttttagtagcttcttctagaccgctccagtcaaactcgggtgctaagaagtcatattcagaatcaacggaagcttcgccttcgattttttcgctcgcagtaaagactcggtcttcactttcatagtgccagttgaagtcgcctgcatctaaaccattttcactcaagaagtcttggaagtattcgagagcttctcttgggctggttgctttaacagtggtagcaccgttttggttttgagttcgctgaccgtagtagtagagggtgtaaacttcttcttgagcttcttcctcagctactgcgtcttctaaaccgctccagtcaatgtctggtgcattgaagtcgtattcggaatcaaccgaagtttcgccttcaattttttcacttgcggtaaagactcggtcttcttcgtcgtagtgccaattgaagtcatttgcgtctaagccattttcactcaagaagttttggaagtactcttttgcttcttcagcgttacttgcttctacagtagtggcaccgttttgattttgagttcgttgaccgtagtagtagagggtgtaaacttcttcttgagcttcttcctctgcaggatcagttgctaagatttcgtttttagcatcttcgacgaatcgaacagttgactgagcattgatcacgtcagcgtattcttgttcggtgtaaccagcttcttgaatttcagcaattgcttctgcttttgcttcccgaagcccttcttcttgttgtttttcgtttactcctactattgttttattatcgacactgccatggtctgcatagtctggtatatcaaagtcgttttcatcttcctcgccagtagattcttcagtagatgtagatggagtagcttcatcatacacttcttcgtttgttgttgcctggtctggaagagcactgacttgttcttgacgagcgtcaataatgtcgcttctcaagctttttacttcttctacagaatctgcgtctctaatgagaccaaggattgattcatctttaatgccaatgccttgtagttcagcaatagctgattctttttcagtctgtagagcttcttgcaattcttcaatagttggttcattatcttcagccgaaactgtttcagcattacccaatagtaaagtcgaaccaactgcaacagatgcaactccaacacttaattttttaagtgaaaatcgttgttttttgttagcagctttttcagcacgtgttttatagttattttttccaaccattataaaactcctttactaattgatttgccatacaagtggcttagtggtattttacaatagagttaaaatgattacaagaactaggacttgtaaactctatttttgtttcaatcaacattttcagtagctacctatttcaataatgggcaaaaagtacttggtaaccactacttctttcattgtaacactattttaataaaattgcaaaagaccaagccaaattgctggcttggtctttcaagtcttgtttatttcaagaagttattcgccatcgataaagtcttcctggacgccttcttcctcttcttcatccttgtactgcccatcaattgcctggtcgtcgatttcttcgtccatggcttcttggccatattcgttaaattcgctgataatgggttgtccggtaatttcaggggcatccgtttcataaaggtcaggcaagtcatcctggtctgattgattggctaggctggtatctttgtcaggatggttttctaagacaggcatttggtcatagtagatatagtcatttgcctctctgcctgccaaggattcaggtgtgtagaagcgtagcaagtctttcatcatgatgttgtcggagtgctctaaacgctggttggcctggtcccgcatctggaagatttcttctttctcttggtcgctcaactggtcatttaacaaggccccgctttggctgtcgtagatatcaccgttgacaatggtgtagtcttcattgataaatcgtccattgcgcatggtaaccgactcattgtggtctggtgagaagacgtcttggcccataaagaggtactggtcggtttcgatgccgagcaggtgaagcaaagtcggcaagaggtcaatttgacccgcatacttgtcaattacatggccatcttcttctcctggtatgtggaagagcattggaatccgtctcatctgggcattgtggtaggcggtccactcatcttcaggaataccgaaaagttcccctagggccgggttacgggtatcggaaatgccatagtggtcgccgtaaaccacaataattgaattttcatacaagcctgattccttcaaccagttgaagaattcttccaaggcctggtcagcgtagtggttggtttggaagtactggttgatggtctcatcacttgtgttggcttgagggaagtcaatattagcctcatcaagcgggtaagggaagtggttggtaaccgttaggaatttggcatagaagggttggggtagctgttcaatatactgggccgagtcatggaaaaagaccttgtccttcaaaccatattccagggtattttcatcatctaaatcataaaattctgcatcgaagaaaaagtcaaaaccaaaggactggtaggtgtctgttcggttccagaatgaccccacattcccgtggaaggaagccgtcgtatagcctttttctgcctctaagatgtctggtgaggcatggaaggtattgctggagcccaagctttggaaggccgacccctggggcaaaccaaacaaggagttctctgccatcacttcagcatccgacgatttcccttggccgacctggtcaaagaagttggagaaggagtaggtggcctggtcatggattaaggagtttaagaaaggggttacttcatgcaagttgccttcttcgtcctccaattcatagtccaccaagaattgctgggcactctctaaaactaccgtaatcacatttctaccttctgccttcccaaacatgtcagggtctggttcagcataattgtcttggacatagttgacaacttcactcaagtcagactcatcagcattggctctgatctggttgttttggaccgttttagctgcatcatagccggtaaaaaagttcaagccaagatatttcacaatataattgcggtcaaaggtccgggttaacaattggggtcggctaatttcagctaggcctaagttggccccaaacagaccagcaccggctagggtggttatgagggctgtccgcttgcggtttggcttagactcatcatggttggacttgaagaccttatacaaggcgtaggctaagagtatactgtccagccagtaaagtgggtcatgccaagttaagacatttaaggttgaggaaaccaagccttttgagacggtccctgccccaactgcaacgttggtggttagaaaatcagcaaattcccgataatataggatattcacaaaaaggaggagactggctaggaaatgaatcaaccacatggtgaccagggattttttactgtccttaaagtacaaacctaaactgagtaagactagcatgattggcaaagggttgagcaataggattaggtgctggaacaagccactcacaccaaggttaaattcaaataaataagccaggtaagttttagcccaaaaggtcacaagggctactagtaaaaaactggtcggttgacccagtcttcgttttaagttctccatacacaaatccttctttcacttatctaaattcaaaaaatcacaaacgagaactgtaaattcacattaataaattttacacaatatttaccttaatagcaagttaacaaaaaccctttagaaaagctattccttcaaggttttatcctggttttcaccaagtcttaaggtaaatttatagtaaataaccccttgtattgattaagaagcttaacataatatttacgaaaagtgaaggaaagaagtttgaaaatcaaagaaaaggcccaaacccctccaaaagagccaaacttatggtatattaaaagaaccatatccttaggatggtcaattctttatgctttcagaaagtaggtaaatatggaagaaatttcgagtaaagactttatgctgcgatacaaaaaagacccccaaatgaagatcttagatgtccggactgagccggaatataaagaaggccatatccctggggctatttcacagcctttagaccaaatagatacttgcagtcttgacaagtctgctgactattatgtcatctgccggagcggacggcggtctagcctggcctgccaacagctccaaagtcaaggctaccaggtaaaaaatgtccaaggcgggatgctagattggtctggcccaaccacttaatctcttttttgattgatgtctaaacttagcccctaaaagcctaagctaagtaaacaagcaccgaactcacttgtgccgagttcggtgctttcctttattcaataatatctcttggtttatgttgacggagttcttcttcttgttcagggctatctgggaattcaatgctaaatgtggttcccttatcttttttactgcgaacatcaatcttagccccatgtagggccaccaattgttgaacgatagataggcctaagccggattccccataagtggtgttttgccgagaggtgtctgccttgtaatagcgctcccagatattttgaatttcttcttgggtcattccaattccagtgtcttgaacatagatcttagtcccgtaatgacctttttccgcccacaccctaattttaccgtggtcggtaaactggatggcatttttgatcaagttgaccaggatttgcttgagccggtcaccatcagccatgaccgtcatctcgcccatatcctgaatgtctaaatcattgtctgcatcttgagctaacgtggtcatttgatagttgatttcttcaaatatatcacttagggggatttctttcttatcaagttggaaacggttggaccggatattttcataatccaggttctcgttgactaagcgaatcagtcgggtcgtttccttccgcatgagctggatggaacgaagccggttagactcatcaatcacaccgtactccaacccttccaaaagaccattaatagtcgttaagggagtccgcatttcatgagcagcatcctgcataaaggacttccgtcgttcttcttgccggcttacttccttctgagactggtccagggctaaaatcatcttattgaaatctcggcttaaattatcgagttcatcccgatccgagtggttaatccgaacatcgtactcgccctgggttacctgtttggtcgccttgcggagccggttgatccggttaacctggtaccaagataggagagctgagagtatgatggacaccactgtggcgatgaaaaaggaggtgaaaaactgactttccaaagctgatatctcatcatctactatggaaaaaggagccatgaccgttacaaaaccagcatattccccactctcctggataaaataaggaacataggccatcatgtattcttcatcctcttcttggtcagtcgccaaatcaaccagggaggttactctttccccattttttaagtcatcgatctcttccggaataatccggtctaagacctgggagctttgttttgggtagataatctgaccttggtcatctactaccaccaaggaaacattaaaccggtccagcaattcctgctcccggctaaagtcattgtacttggagatagagctaaccacttcttcagcatagataaaaaggtcttcctgggtggaatcataggctgactcccgggttaagtgaaagaaggataggagagaagtatacattaagaccaggatgacaaccagaaagcccagcatttgctggtaaaaatagggtagcttcatggctagtcactatccttagtatcgtcaaatttataacctacgccccaaacagtgtggatgacttggggacctttttcaaccaatttttgccgcaattttttgatatgggcatcaacggtccgctcatccccaaagtattcatattcccatacctgctgcaataattgctccctagaaaagacttgccggggcttacttgctaaggtgtggagcaagtcgtactctttcggggtcaagttatccaacttttgcccgtagagggtcacttcccgggttgaagagtccatcttcaagtggtctgtttcaacttctaagttttcttggtcgctggctgtccggctagcccggcggtaaatggacttgatccgggccaccaatgttaaggggctaaagggtttggttacatagtcgtctgcccctaactccaagccgatcacttcatcactttccgtatttttagctgtcagcataatgatgggaacctgttcatccaccttgcggatttccttgcaaatactggtcccatccaaactcggtagcataatgtctaaaacgatcacgtcaaagtctttgggttggtttaaataggtatccaatccttcttggccgtcttcaataaaggtagcctgccagtcttcttttaggaaaaacatctccagcatttcactgactgaactattatcttctaccattaatatcttcatagttttcaccctcactcatagattcaccccttattttaacgtaaatctttgaaaaatctatgaaggaaagaaaaaaagcatccaggctccatctcgctaaactagccaaccccttcaagagttatagtgcaaactatttcttagccagttctttgagcaggtccacttcttcttttttgttttgtaaaaactgaatattgtcgacatttaactcaacgacatacctgacttccttgtctttggtctcgtaagaccgggactggagccgaccttctagggcaacttgatcccctttcttgcaatactggtccagtaattcagccttcctcccccaggccacaaaagggatgaagtcagccgtctgcttgcctgaagacttggtcaatcggttgatagccaaaacattgttgataacccgactgccgctttccaaattatgcaaacttaggtcccgaacaatccgtccaattaatatacatcgattcatttccattttcctctcaattttttaaagcaaggctttcttgctcctagctatatatacgcaaaaaaagtggaaaattatttttttaaaataaaaaacgacttatttctttgcgaaataagccggatttctcgtatggatttggaggacagggtcaagggcaagctagctgacaaaataagcaaaaatttgctgccagacttgagggttcaaaacatccagtgggttgcccccatcccctattaaactatagcctaacatggcccctactaagaaggtaatggcaatcacgagaacgacaattaagaccttcaataaaaaatagagtatatcctgaataatttcaatgaaatccatcttcgcacctcaattattgaccttgtctgtaaataccctttaatcataacttaaaaggtccgaaaatagcaagaagtatgttaaatatccgcaaggtcatggttgactagaatcaatatgtctatcctttcacttctgctaagggaaaagccccttgaaaagcatactctcttcaggggcctaacacttatcaatatgttcttaactcttccttattcgccttttttgaggctggcttcctggtcaacttgaatttcctcgtcgattcgttcaatggaagcacctaattgctgtaatttttcgtgaaatttatagtagccccggtctaagtggttaagattggttactttggtgacaccatcagctactaaaccagcaataatcaaggaagctgaagcccgcaagtcactggactggactctagcaccttggagttttttgcccccctcgataataagggactggccatcgacagtaaattgtgcatccattttacgaagctcttccatgtgcatgaagcggttttcgaagaccgtttctctcatgatgcttcttccctcagctagggtttgggcgactgtcatcggtgactgcatatcagttgggaagccaggataaggcagggttttaacatctgttgcctgtaaggtctctggtcccatgactcgaaggccggttttttcttcctcaaattgaacgcccatttcacttaacttggaaattaaggggcggttgtgttcgacgatacagtcttcaatcaagacattcccttgggtgacaccagctgctaccataaaggtgccactttctatccggtcggcaataatggagtggtcacaagcttctagcttgtctaccccttcaattctcatggtattggttccggccccgtaaatacgggcacccatcttgttcaaatagttggcaaggtcaacaatttcaggttctcgagctgcattctcgatgactgttgtcccttttgcccgggtggcagccatcaaaatattttgtgtagctccaacacttgggaagtcaaggtaaatatcagcgccatccagttcatcttgaactgtggcgatcacataacctccttcgacttccacatcgacccccatagcccggaagccttttaagtgcaagtcaataggacgagtcccaatcgcgcaaccaccaggaagagcgactttggcataaccattacgggctagtaagggacccatgacaatgatggaagcccgcatcttgctcataaattcataaggggtattggaattcaggtctcctgtagcatctatgacgatttcgttgtggtcttcatcgaagtcaatgtcaacgtttaagtaacgcaaaacttcttgcatcgtgtaaatatcagatagtaaggggacattggacaggtgacttttcccatcttctggtaaaagactggcagccaggataggaagggcagcattcttagccccttctaccttgactgtaccctcaagtcgattgtctcctccttgaatgacgattgtgtccatactctatacttcctccaatttaatagccatacttttataaactttgttttttatttgacagcaattaccaaaatagttgtcaaacttattatgattataacatatctatttcgttatggaaattatatgtcaaaagctgttaaagctttgacactaaaacaaggctccgattgactgggctgtgaaaatgatttccaagacaaaaagactgacattatagccaatagcgatggaaataagcataaagagtaaacgggcttggggaatgtggtgttttttgatccagccactagttagcagtgactgcatggcccaaaaggttaagacaataaatatcaaatgggaaataatggcaatcacagcctgtccatcgacataaaccatgctaagactcctctctaaaattcctttcctagcctaggtcagacatggtgtaatacccttaagccaggctaaaaaataaagggtcaaggcaagacctcaacccttttcgatcatcttataatgtaccaaataaacggtcgcctgcatcgcctaaaccaggctcaatgtaagcattgtcatttaatttgtcatccacagcagctgtaaaaatgtcaacctctgggtgttcggcctgtaattctttaatgccttccggtgcagcgaccaagaccactaacttgatatccttaccgccccgacttttcaaggcctcgatggtagcaatagctgatccccctgttgccaacatcggatcgacaaccaggagctgtctgctggcaatgtcttggggcatcttacagaagtattccaccggttttttgctttcttcatcccggtaaacccccatgtggcctaccttggcagcaggaatcaagtctagcattccgtctaccatcccaaggccagctcttaaaatagggacgatgaccactttcttacccgctaagcgtttttgggtggtcttggcaagtggggtttcaatttcaatatcttcaaggggcatctgtctggaaacctcataagccatcaaacgggcaatttcgttgacaacttctctaaaggtctttgttccggtttccttgtcgcgaataatggtgagtttatgctggatgagggggtggtctaagatatgaacatttgccattgctaagctccttttttatctggtctgcccgataggcaagtagtggatggttattgactagctgctttttccagtcgattcatataggcccaaccaagtccacttttggcataagactgggctaggataagggtaacaggagagtcatcaaaataccgcaagcccttgtagagaacttgacaagcccgggccacatccttagggcctcctaaggaaaagacatcgtaaacttggtcaccgtaattttcaataatatcatcgctagctagaataccaattttttcgccagatttcaagcacttatcgatcgcctctgtccaattcttgtccacaatgtagacaggctggtcaggggaatagtggcggtacttcatacctggcgctttaggtcctttgtcacctgacttggactgggtcttgtcttggacaggtccaataacccgctcaatatcttctcgagccaggccacctggtcgtaagatggcaggctggtctggactggtaaagtcaaccaccgtcgactccaaacctaggccagttggtcccccatcaaggaccccggcgatccgaccagacaagtcatgccaaacatggtcagctgaggttgggctgggccggcccgacaggttagctgaaggggcagccaaggctaagccggacgccttgagtaaatccctagcaagaggatggctaggcatccggatcccaatagaatcctggccagccgttaccgtgggcgctgccgtctcttggtcatggtttaagataatggttaagggccccggccaataggcatcaaccaagtcctgggtccgactgggtatccttgagctaaagtcatagacctggtctacagagtagatatggacaataagggggttgtcactgggacgtccttttgcctggtaaattttttggacagcctggtcgtttttagcatctgctcccaggccatagacagtttctgtagggaaggccactagctcgccctctttcagtagggtcactgccttgtccaattcttcaggctttatccacaaactttccacactttttcacatccttccacattcttatacacattattgttgaagttatccacatgcctcttttgctaaattgtcaaagttagtctaaagcttgttgtaatgcggtttttcgctggtctgtccagcttgttaaatttgttcacaagtgtgcataagttagacaacaactgacactaagcggtccaagccggctaaatctgtccaagtttttacacgggcctgtggataagtttcctgggccaggtgagaaaccgcctggccctgcttatagcctacttctagcaaaatcataaacttgtctgctacaagtaatttggactgggacaagattttctggtaagcagccaggccatcctggtccgcaaaaagagctaatttgggttcgtacttccggaccgattcgtccatttcatcccactcttctttggcaatataggggggattggacacgataaggtcaaaatgaatgtcctggtcgagcaagggggttaaaaagtccccttgaacaaactgcacctctgctcctaatcgttgggcattatcccgggccaggtctagggtttggtctaaaatatcggtcaagtaaacttggtcttgggggcgtctaagcttatgggagatgccgatgactcctgtcccggtccctacatccaccagcttgaggggtttaggagataacttgtcgatatagctggcaaaccaggcttctgtttctggcctggggattaaggcagacggattcactttaaacttgtgaccgtcaaaccactcatggcctacgatatactgggcagggtagtgggggctggccagcttgacctgcttggtatagtcttgccggtctcctgctggcatggggtctttcgccttgactagcaagtcagttgggctaaggtctagcccttccctcatcaaccacttggccacatgggggtctacaccccggtcggccaaaaaagaagaagcccattggaggacttctgaatagcttggcatattagaccccttcattgcttaactgctccaatttctcggtctgttcccatacgattagttcatcaataatttgaccgaggtcgccatctaaaatttggtctaatttttgcagggttaagttgatccggtggtcagtcacccggctttgggggaagttataggtccggatccgttcagaccggtcgccagttccaacagctgacttccgttcagcgtcaaattcagcttgttgctcagactgaatcttgtcatataccctagaccgcaagaccttcatggctttctcccggttttttagttgggaccgctcgtcctgcatggccactacgattccagtgggctcatgggtcaagcggactgcagaagcggtcttgttgacgtgctggccaccagctccagaagcgtggtagatatctgtccgaatatcattgggatcaatgtcaatttccacatcttctgcttccggcatgacgacaacagttgcggttgaggtgtggatccggccctgggattcagtctcaggaactcgttgaacccggtgggccccattttcaaacttcaatttagagtagacattgttgccgtcaatggagaaaataatttctttaaagccccctactccacttgtgttagagtctaggacttcgaccgtccagccttggttttcggcatacttgcggtacatttcaaacaagtcgccggcaaatagttgggcttcatccccaccagcagcccctctgatttccatgatgatattgcgttcatcgttttcatccttgggtaagaggaggagggttagcttgtcttccagttcatcctgctctgacttcaagtctgctagctcttccttggcaaggtctgccatttctttgtctaagtcgctatcagatagcatgtcctctgtctcttggattccctctttgacctctttataccggccgtaaacttgaacggtttctcttaaatctgcttcttccttgctcaacttcataaagcggtcggtatcattaatgacttgggggtcacttaagagttcatttaattcttcatatctcgcatcgactgcttccagtcggtcaaatatactcgtctggtcactcattgataatcttcccttcactgtccaatggcgggttaaagtagtgctggcggcaaaccgggtaataagattcattgccgcctatttgaatctggtctccttgtcggactggtttgccttcagcaatccgcatattcatggtggcctttttaccacagaaccaacaaatggtcttcatctcttcaatcttctcagccaaaagcaagagatacttggacccctcaaacaattcattgcgaaaatcatttttcaggccaaaagccataacaggaatgtccaaatcgtcgcagatctgggctagttggtaaacatgttccttggtcaaaaattgcgcctcatcaatcaaaacacaagaaattttatcttcgatatttttcactgcctcaaagatattggtgtcgtggttaatgaccgtggcatctcggttcatcccaatacgagaggcaattttcccaatctcttcccggtcatccatgcccgaggtaaagagggccacttttttattttgttcttcataattgtaggctacttttagaatctcgattgacttacccgaattcatagccccataccggtagtaaagttgtgccataaacctcactcctactttcttaaaagtccttataaattataacgaagattggcccgcaagtctatcacttgccttcatatccgtatgcagtaaaactaaaaagagaaggggtgggcccttctcttttggcttggctaagcaattagtttctagcgtaagtaatatctctcgttttgtaagtcaaccctctaatatttttatcgctaccaggaaaagccaaagataggaaataaccaattaagaaagtgacaatgaaggcaacagttgcagtgagcaagggtgaaatattcatggcatccgttattattgctaaaacgattccggcaattaaaccgatgagggtccctttgccatttgctctcttcgtaaatatgcctaatgtaaagacagcagcaattggcacaccaaagagtcctccaatagctaaaatgatgtcccaggtttgagaggagttaccagctgtaaagtatactgtaactaacaagccaaataaaccagtgactataataatccatctagctattgaaacttctgatacattttttagtttatcctcaaagaaccgtcgtttgatatcaacgaccaagcaggctgagatcgagttcaagctactggagacagttgattgggaagctgcaaaaattgctgcaataattagcccagctataccagcaggaagttcagttaagataaagaatggaacgacagcactagtgttaactccagctggcaaaccgccattttggccataataaacatataagacactgccaatagcataaaaaattgggaaaaagacaatgcagagaccgtaagttagccagagtgattttttagtttctttcattgattttgaagtgacaaaacgttgtaccatatcttgagaacaaccatattggtaaaggaaggaaacaagttgccctataaaaattagcggaacataatccgataaatcactcatgtctaagttactagctgaaaagaatttcccttctgacactatggtatttgatatttcgcttagacctccatcaattttaaaaatagccatcaataaaattagaattgaaccagcaagtaaaataaagccctggatggtgtcactccaaattactccttccataccacctaacaaggtataaataatacaaactaaactaactgcaacagcaatcaaaacgggattaatatcagtcactgatgcaactgccaaaactggcaaataaacaactactgaaattctaccaaggtggtataaaacaaacaaaacactggataaggtccgaacgactgggtcaaatcgctcttctaagtactcgtaagcagaggttacttggagctttctgaaaaatggtacaaagtaggcaatcaaaattggtatgacgactattatacaagcagatcccacaatataagaccaatcactaatgaaagtctgttctggcgtagacataaaggtaattgagctgactgcagtagcaaaaatactcattccaactgcccacccaggtaagctcccttcagctttaaaaaaggcatctgaacttttgcctgattttctgatgaaagaactaccgaaaactaacataaacaataaataaacgactaaaacgaccatgttggtaaagccaaagccaggattggattccatgctgatacccctttcattatttccttttttcgaacactcatcctttatagtagaacaagcgctaggtatggtttaatctaacctgcatcctcagttatcacttgagattgatttattatgtcttgactatcaaatctttgcatgagtaagacatctttcaaatgcagctggtctctagaccaagaatcataattttcataatgcaaggctatttccccatcgggagtctcggttaaatcagaataagaaaagccatcttgtgtatccggaatagtacaacgatatttccattcgatttcttcaccattataaagaccgataatcaactcgccattttccctagcttgggtagaattgggggtactaagaataactgctagcttgccttcaatttcttccgaatattttaatgctgaaacctgtgtcccatattgtgtattgtctacaatatcaagattggtgatttcggtccaagtgtccccattgtcatgactcatgctgtaaccaattttaccattatcagttcttgtaaaggttgctaaaacatcttcttcaagttcaattgtttgcgattcagcagttgcttcagaaaatggcaagtcttgtcttactgggaaccatgtttcaccgtgatcatcgcttacaatatatataatggctgattcagtataagaagacactagcaagcgtccatttgaggtctctaaaccgccgccgggggacaagtatggcgcattatggtctgggcccaacaagggatcaagtaagttcaaaggtgaccaactttccccttgatcctgactgacggtatagcccacatagtttgtagggactactttaaataaagagtcataatagaaaatgttcattttaactttggttccattttgatactcaatgagctgaccatcttgaaagtcaaccgaatattgttctgtatacaatgattctccgttttttaggatgttatagtcatcatcaacgctataatcagtttcttcacctgtcctttgatcataaattatctggtctggccctagcaaataatgatattcctcttcatcttgcgagcgtaattttaggaaatattgaccgtcaatttcttcaaaaccggaatcatttttccaagcattgctattcccaacgccagctggcataacatcagcaaataaatatatattaccagtttgagaatcttctagaattgctgaatcgataaaagaggcactgtatttaatttgttcttctttcccttggtcatcacgaggccaatctatttcttgattggcgtaatcatcaaaagacaagggtaatattgattcagaccaattcatcccgttatcatcactgtaagaactggcaatggcgatattgttcggtgaatcatgtgtgcctccgtaccgggcgtctgcacttgccaagattcgaccatcatttaacgtataaatattaggaattctaaagtaattagctgctgtttcatcaccagcaaaaaatatctttgtttcttccatatttttcttcaggtctccggccgaacttgtttcttcaatatctgcaggactagcagtgcctagctcttctgctttgatactcttatgattattgggtaaggaaagtgcgcatatcaaaaaagacaagaccagtgaagtaattatatgatgcttaaagtgtttcaattgaaaaactcccaacttttcattctataaaatttcgtttaatttaaccactcgtttttcctggtttgctagagtggcggcatctgctgtagcaatagcctcttctgcagcagaaccatctaggagttttcggtattcatcaggaacttccataccatggagtacatcatttaaaaacgtaacttcttttttgatacagtcatttaaccataatggagcctgtttacctggatgaccatactggatggcaccatccatttcagtcccatggtaaatacgagttcggtcatcatcaatttcttgtgagccatgaataaggaaatggtcatcttgaccgtccactcttaaagtacccccacaatcatacatatctagcataatggcacccttcgttccttggatcaaaacatagtgttcgccccatctaaatgccgagccccattccaagtgagcatatttattattgggaaattccaaattcatactaatgaaatcatcttcgtcaccgaactcttcacccttatgggcaatgtcagatgcagacatagcgacatgacttggcaaaccacccataataaactggacacaatctaattcatggatgtggtgatagaggtgaccgccagacttactgcggatttttttccaagaaacactctcttgcgcctcttcccatccattacgagctgccttcacaaataatacatccccaatttttccatcttggatatactgtttagcttggcggactccatcaaagaaattcataatatgaccggccataaaagttacgcctgcattcttgcaagcttggaccatttcatggcagtcctgataatttaaggcaattggtttttcacaaaaaacatttatacctgcttctgcagcttttaagacaggctctttatgtagattgttgggggttgcaacaatcatacagtcaatgtcccctcttttaacaagttcgtctaaggaactttcaaattcacatcttagttcgctagctatttttctgccattatttggatcatataccgctttaattttagctccagccagagcctggatagcttttgctaattcagtaccaaaataaccagtcccgacaacgccataattaatcactttttgatccattcatagacatcctttctagaatactttatctataaaagtgaaaggggttaattctaaaggtcaaaaataaagtgagtaatccctttcttttcccttaaaacaacttaaaaccataagataaatggccaacattgaaaaatgaaaaacaatggcctattagctttctcttggaaactaacaaatcactccctttcagtaaaaatataactatatatcattatggttttaacaaggattatatttttttacaatgggattataacgcttacagaaaaagctgtcaatttagctgggaaacgaacttgaaaattaatcttttagaccttaactaaaaaagagaagggtttgacccttctcttttggctttagctcttgcttggctttagctagcttggagaaatttctccaattcggttccaatctttatcgtgtaaaataatccgggctgggatcccaactgccgttgcataagccgggacatcccggttaacataggcgccggctccaaccttgctgtggtggccaatggtgacatcgcctagaataatggcaccagccccaatttccacatcattttcaatggttggatggcgcttagctcctttctctttaccggttccgcccaaggtgaccccgtgatagagcttgacccggtcacctacaatcgctgtttcaccgataactaccccggtgccgtggtcgataaaaacattagcccctaactgggcaccagggtggatttcgatattggttttcttcttagttcgctcggacaaatagcgggcaaagtttttaaaacccttttggtaaaaatagtgggccttaaagtggcgactgtaagccactacgccaggatagaggaagaaggttgaccagacgccccgggctgcaggatcattttggcaaatatgcttggctagctggtaacgcttagtccaactcatcggctaagtgctcgtacaaggcagtagtcaagtagcgttccccattggatggtagaacagtcagaactttttggcctttgccaagttctttggccaagtcaagagctccaagcaagttggcacctgaagagatcccaaccaagaggccttctgactgggctacttcccgggctttagccatagcatcctcattggaaacctggtagaccttgtcatagatgtcttggtctaagatttcaggaatgaaattagcccctaatccctggatcttgtggggaccagcttccccgcctgacaagagaggtgaagctgctggttcaactgcccagaccttgatcttgtcatctttttcttttaagacacgaccaacaccagtgatggtgccaccagttccaacaccagctacaaagccgtctaggtccgggatgtcttgcaaaatttcttgggcagtggtttcttggtgggacttaacattggcttggttagaaaactggccaaagataggggctcctttttccttagcaatttcttcagccttgtctcttgctccagcaacaccttggtcccctggcgtttgaaccaagttagcgccataagctttcatcaggagtttacgctctttggacatggtctccggcatggtgataatcacatttaaacctaaagcagcccctaccatagccaaggcaatgccggtattcccacttgtatactcaacaatggtgccacccggttttaagtcgcctgatctcagcaagtctttgataatatagcgaacaggccggtctttgacactgccgcctgggttttggtattccaacttaacgtaaacatcagcagagtcttctggaacatggtggagtttaacaaccggcgtattcccaatcgcatcaatgacattattgtataacatgagctcaatctccttttacttgtatttacttactaattgttagtatattaaaaataaaagggaagttcaacccagaagaccggtgcttctgatgatttgtatttcgcttttgactgaacctgaaagattgactctagaggtctgctggcccatttcttagtaagttgtcacagcataggatactgttgcagaccccttgagaagtttagccatggggcagcggaccttggttcgctccaagtactcttggacctgtcttaagtccatttggtcaatggccagttctgcatctaagctaaagtaaaaaccagtttcatcctcttcctcatgcatttgaaccgcaactttgactcgggtcttgttgtccagtccatcttcttccaagattttttgaacggtcgaattaaaacaggtactcaaggccagcccgacaaatttttcgggattgaagccttggtcttcggacaaggggtgggctacctttatggggtcttcaccttcgatataactgtagccgtctaccccatcttcgttgactgccttggtttggtataaataagtcatctttattatcctttccttttcttctttgcctctagtataacgaccgacccctaggcccacaagaataaggctagctatttaattttaggcaaaattccgctaaaaaagccaagtcagttcttggtcctatagttcggttatagattagttgacttggttggagcgaaccatggcttattattgtcacttttcaagtctgaaagtaccgtatggctcgcccattgtcgcctttcaagttcgaaactaccttattttcatttattgtccagtttcaacttcaaaacttccttattttgatttattgtccagtttcagcttcaaaacttccttattctgatttattgtccagtttcaacttcaaaacttccttattttaatttattatccagtttcaacttcaaaacttccttatttctatttattgtccagtttcaagtccgaaaccactctatttctagtcaatcgccagcttgtctcagagaggacaagtcattcctaaaggcttgcaaatttagttaggactagatttttcataattcacttcaaaatctctgcatcaaaaaagggcaactttaacaagttaccctcaaaaagtattcccattgtttcaagctttctagctatcccaggcaaggtctcctgcttggtcatctgaagaagcaaactgggcatagtaaagatcagcgtaaaagcctccctggtctaggagttcttggtgggtgcctgtttcgataacatcgccgtggttcatcacaatgatcttgtcagcatcctgaatagtagacaagcggtgggcaataacaaaggaggtgcgctcttggataatattttccatggcttcttggatttgtttttccgtccgggtgtccaccgaagaggtagcctcgtctaggattaagatctcaggatctgccaagaaggcccgggcaatggtgatcaattggcgctggccttgggaaacgttggaactttcctcgttaatcacagtggagtagcccttgggtaggcggcggacaaagtcgtctacattggccgttttagcagcctggaggattttttcatcatcattggcatacttgtcattaccgtatgcaatgttctcccaaatcgtaccattaaacagccaggtatcctgaaggaccatggacatgtgtttgcgcaggtccgaccggttaaagtggcgggtatccaccccgtctaggtaaatactcccgcctctaacatcgtaaaagcgttccaaaaggttgatcaaggtcgacttcccggccccggttggcccaacgatggccaccatttcacctggtttcacctgcaagttaaagtcattcattaagaggtcggcctctggatcatctgcatagccaaactgaacgtgttcgaattccaccttgtagggagtatcttgcttgtctgggacatcgacttccactttttgcataggttcttcgtcaatgatttcaaaaatccgctcagttgaagcaatggtcacctggatggtgttggatagttgggcaataaagcggacaggctgggagaattggttaacatactgcataaaggcttggacgtggccgatggaaatggtcccgttaataacaccccagccaccaaagacaccgatcccaaagtaacccaggtccctagcaaaactgaccaggggcatcataataatggacaggaactgggccttggtggaggcatcatttaacttggcactttggtcgacaaagcgggcattttcatcttcttctcggttgtaggtcttaacaatagtgtgaccggcatagacttcttccacctggtctgtcaaaatccctaactctttttgctggcgggcaaactgcttctgggcccttggtgcaataaaataaatacagcctgcactgattgggaaggttagtaaaacaaccaaggctagcatccagttgaccataaacatgatcactaggacggtcacaaacatgatgaccccattaaccaattggattaaagattgttggagggtgttagcgatttggtccatgtcgttgacggcccgggacataatgtccccattcccgtgggtatcaaagaacttaatgggcagggtttcgattttttcttttaggtgctcacgcaagtcataaacggtcgcctgagataaagcagcgagtaaaaaactttctaagtagcgcaaaagtgcttggctgaggtaaataataacgatggctataatgatttggataattaggtcataattgataggcaggttggtcaaggacaggttgtcgctcactgcctcttgaaaggcccggatgacttcattggtggccatagccatgacagagggagcaatggcattgagaataatggctgccagcccgaagatgacagcaaagatgaagattcccttccggcgagacatatactggactaagcgccatactgtcccccaaaagtcatcagcgtggcgttttctgtgggcttgtctggccattaaacttcctcccctctcatttgtgactggataatttcttggtagactgaattcgattctttgaggtcctcatgtttaccagaccccacgacccgaccgtcttcaaggacaataatctcatcagcattgacaaccgtactgattctttgggcaataatgaccactgccttatcccgagtcactggtgtcaaggctgcccttaagttagcatcggttttaaagtctaaggcggagaaggagtcatcaaaaaccagcaagtcggcatcggttaccaaggcccgggcgatactcaagcgttggcgctggccaccagagaagttgcccccaccttgttctaccttggcatctaaaccgtcttccaaaccttccacaaaggccttcccttgggcgatttccaaggcatcccagagctcttggtcactggcgtttgggtggccataggtgaggttttctcggatggtacctgaaaaaaggatggcctcttgaggggcaaaaccaatccggtctctcaagtcttcttgactaatgtagcggatgtcctggccattcagcttaatggagccagattctacatcgtaaaggcggatcataaggttggcgatggtagatttaccagacccggtccccccaatgatggccaaggtctggccggccttgacttccatgttaatcccttctagggctaggttggctgcattggggtagcggaagtcaacgtcttcaaaggcaaaatcaatagactggtcgctgacctggtctggatggtcgtcatccttgatagtagattggtggttcaagatagccaagatccgttcagctgcgatttggcctcgagggataaaagacaggacttgggctaggagcataatccccatcatgatcaagccggcataggttaagaaggcaactaggttccctacctgcatctgaccagaccctaccaggttagccccaaaccaaaggatcatgatattggtcagcatgataacgaccaagaagactggcatcatgagggccatgcgggcatatgccccgatggaaatagacttgaagtcctggttagaagaagcaaagcggtcttcttcatattgactcttgttaaaggctcggacaacccgaacaccggtcaatccttctcggaagatccggttaatttcatccgtctttctttgcaagcggcggaagaggggctgggccgaccgcataatcaaccagatggctagccccattaaaggggcagtaataataaagacaaaagccaacttaggctcccgggtaaaggccatgatggtggcccccaagattaagaaggggtcaacccctaacataatgaccacttggagcatgacaaactgcaactgcatgacatcattggtggtccgggtaatcaaagaagctgtcccgaactggtccaggtcctctttggaaaagttgacaatttttttaaaggcccggttacgaaccgtctcccccaatttttgggtttccctagcagtaaagaccgaactgcctaccgcaaaggcaataaccaagagggccactccaatcatgagcagaccttgtcggataatatagtccatgtcttcttgcaagacaccgtagtcaataatatccgctgtcatggttggcaagaggatcatgccaaagacccggcaggctgacaagaatatggacagggcgacatacttggtctccatctctttaaacaaacggaacattaacaattctctcctttttctactcggctaatcccgtaaaagacccagtctagccgtttgataaaatggtcttgggtcacctcaaccggtgcattcttccaaaagccctccataatactattgttcaagagttcgtggagaaactgcaagacctctaacaactcagccttcgtggaaatcttcaaattatctaagcgaaccacttcatataaggcactcttatggcgatccgtaaacatcaagttgatactctcacggtttaaggcatagttcatattgaggtatagtttttcaaaaaagccaaatttcttagacttggtgatattgtcaatataataacgactataacttttataagaggcataaaagtctccttggttctttttaaagcaagtcatcagcaagttgtggtagttccgcttaaaaagaccaatcaagtgaaggtacaagtctaatttatcttcaaagtattggtaaaaactcccccgggaaataccagcctggtccacaatttcggcaacagaggcctcattgagggccttggtcgaaaaaacagccatagccccttggataatccggtctttcttttcctcgggaaggttaaaaaaagtttgtcttggcatgtttgcctcccatcatgacaagctgtcattttttataagtaattcctattatagatgacagtctgtcacctagcaaggccaaaaactcattataaaagaagcatataaaagagccttgcagtttagattagactgcaaggcggttaggattgatattttgaacgttccagtctagtcctggtctttcaagacggctgcttgactggcatgtccttggtcctcatggtacaagtccgtttcttctttgacgtattcaaaggccatgctgaccacaatcttgatgatggcataggctggcacccctaagaggaggcccaagacgccaaagagactaccggcgattaagaggataaagagaatggtaatggggtgaatattcaactggctacccagaatataaggttggataacccgattttccaaaatttgttcaatgataaagaggatagctaagtaaacaaggaggatggggtcttgaaataaggccactgctgcagctagtaggcctgaaataaaagaacccaagtaagggactaggttaaagaaaccagcgataatagccaagaccaagaaatagttgaggccgataatggcatagccgattaaaaagataatggcaacgcagatagcaacaaaaatctggccacggacataaatacccaactggaggttaacattggacaaaaatttacggacagtatgcttcatccgggtgggggtaactttgaccagtccttgggcaatttttgacccatcaactaacataaagtataggataaaaggaacggtaaagatagtgatgaccacctgggcggtgacgctgatcacactcccgatcccacccaaggttgctgataggacagtttgaaactggttggcagcattttctaaaatattggtttgggaaactgtttctaagatttgggccacaaagtcagccccaatttcctcttcaaagaagttaacagcctgctgccagtaggatgggaactcttggatgatggcttcgacctggttgttgataatcgggacaataaagacaatggccccgccaatcaaggccaagattgccaggaagacaatgataacggaagccacccggggtacaccctttttattcataaaatcgacaaagggtttaaagacatagtaggtaatgaccgaggcaatcaagggggcagacacaatctgcaaggcttgtaaaatcggactcagaaaaggcctcatttgtaagagtaggaagaggtttaaaagaaccaaaaaagagaccaacaggaaaaagataaacttgtggttttttctaaactgacttagactaaatttcattgtctcacctcattaaaaatattttaacatattttacccattctggcggaacttttcgttcaatacataaactagcctggttttgttataataacaagcagttaaatagatgagaggagtaggcaagatgattaaaaaaattttactgggaacttacacgagaggggaaagtcaaggcatctaccaaattgatcttgatccatcccaaaaaaaattaaacaatttgcagctagtccaagaaatagacaacccaacctacttaagtttaaaccaggatcagtccttcctattttcagtggtaaaggaaggagaccaaggtggagtcgcctctttcaagaaagagagggatggctcctaccaattacaagataaggccctgcaagaaggtccacccccctgctatttggcctatgaccaaggccggcacttgctttattcagccaactaccacctaggcagtctccaagtctaccgtgtggacccacaggggcagattagcttggccgatagcctaagccaccagggatccggaccccatcccaaccaagaaggccctcatgcccactactttgatcaaagtccagatggcaactacctaatctcttgtgacctgggaacagaccaggtccagacctaccatgtcaaccaggaaggcaagattagccaagtagcctgcctagaccttgagcctggctctggcccccgccacctaaccttccaccccgacggtagccatgcctacttgtttaccgaactaaccagtcaaatttacctcctggactaccaggccgaccagggcagttttcagattttagaccaagtctccagcctgcctgaagactttgagggagaaagtagcggggcagccatcaagctgacccaagacggtaaatatttatatgcctccaaccgaggccacaattccctggttacctaccaaatccaagacaactacaccttaacggaccccgcttggaccccaacgtatggccagacccccagagacttcgccctatcccctgaagaagatttagtcctcgtgggccaccaagaccagaatgtcctgaccctctttgaacgaaccccccaggatggtcgcttgagcctccttgaaaaagatgtctacgccccagaagttgtctgccttaaatttttaaattaagtcaaatgaagttaaaaaagctagctaggtttctcactacaagaaacctagctagccttttaactaccgatctttattcacccttgctggtcacttggccaagttcagctccctggctagtcttgccggtcacttggaggtcaaagccttctaccttatccatattggtaaagaccacaataatggtgtcgtccttgccagacttttccaagccttgtaaatcgactgtggaaattagggtgtctggggttacctcgtcgccttctttgaccacggtatcaaaggggcccccatctaattcgaccgtatcgatcccaatgtggaccaagacttcaatgccattttcaaactctaaaccaacggcgtgctgggtaggaaaaacggatacaaccttccctgttccaggggcataaatttccccactttcaggacggaccccatagccatcccccatcattttttgtgaaaaaactgggtcatctacttcttcaatggttacaacttcgccttctactgggttggtaaaggttacggttttggtcttttgagggttttggtcctggtctttgcctttgtcaccttttagaaaatcaaataatcccattcttggtcatcctttcctaagtttaaggaatatcgtgcataatatagttcaattctagcacatccggccatcacatggatagccatcctaccattttctcttattctttaataaactttaatccccaagccttgtcgatttggggaaatttttgtagaatgctagggtaaataaattggataggagttacatatgtttatcgaaattattaaaaccattatcttaggtatcgtccaaggtatcacagaatggctccccatctctagtaccggccacatgatcctagtagatgaattgatcaccttaaacgtcacccccgaattccgggaaatgtttctggtggtcatccagctggcctccgtcttggccgtcatcctcctctacttccatgagcttaaccctatcgccttcagcaagtccaaggaccaaaaggaagagacttggaatatttggttcaaggttattgtaggggttatccctgctggggttatgggcctgctattcgacgacctaattgaccagtacttcttcaattggttgacagttgccatcatgttaatcgtctacggcattgcctttattattatcgagcactacaacaaggaccggaccttccccatccaaacttggggaagcttaagctataaaactgccttcttaatcgggtgcttccaagtcctcgccttgattcctgggacatcccggtctggcgctaccattgtcggtgcccttttgatcggaaccgcccgacccattgccgctaagttttcctttttcctctccatccccgtcatgctaggagccagcctactgaaactcttaggcttcggtctatctttcaccactggggaattaaccatcctcttggttggctgcctggtttcctttgccgtttccgttatcgccatcaagttcttgatggcctacatccgccgcaatgattttaccgcttttggttggtaccgaattgtggtagggattatcgtcattgcctactttggctttatagccggttaaattgataattaaaacagaccacccctccttgccttacaggcaaggaggggggtttttgtgctttccttagcttagaggaaaatttcaacgactaacaggagtaaaaacaagaaggaaatggtcaggttagttggattcaagcgacctttttggccgaagatgaaggcaatgacggggtaaaggacaaagccataagccataccggacacgatactaccagacaaggggatgcttaagatgatcacaatggccggcagccacaaggaccagtggggcacttcgatgctggtgatgagtttacccatagataagccggtaaagacaatgactgggcctgctgcaaccgctggaatgtaggagaagagcggggtgacaaacaaggcgactaaaaagagtaaaccagccacactggtggacaagcctgtccgtcccccttctaggatcccagccccattttcggacagggtaatggcaggactggttccgaagaggccagataagacactcatcactgaaacgacctggtagctttttttcgcttcttcacggtcttccacaaaggcctctacaatgcccaaggcttgaaagattaaaagcatgacaaaggagaagatagctatcaggccattgatagagatcatgttggagaattgaatgtctaaaagatcaaaataattgctaagttccaacaaggcattggtggaagatacctccagtccatctgtaaaaatccaaaagatagccgtaatcaaggcaatggcaatcaagaaggcccccttgaccttaaagagggtcaagactaagacaataagaaggccaataaaaccaagccaagaccaattaaagccatcttctaggaggaagccagcattttcaagcccaatccggacgagaaagaggccgattccaatggtgatggcttttttgagttctaaggggatggacaaacggaagctttcaataaccccagtaaaggttaacaagacaaagattaaactggagacaatggtaatccccaagctttcctgccaggtaaagcccaaaccaccaaccaaggtataggcgaaataagccgtcatcccaagacctggtgccatgaccaagggggtatttgcataaaggcccatggttaaactggctacaatagcaataaagatagttgccaagagacttaagacttggggcacgccagcttcacttagcataacggggtggacaaatagtatgtaagaagaagaaaagaaggtaatcaaaccagccaagatttcggtttgaatactggttcctttctcacttaatttaaagtattgatccataagatcctccttaatagaaaatgttaaccctatcctaccacatttaactggggaaatatagactgttcccgaacaattaaacaattaattactttatcgttcagtttcacaggcctggtataagatattgcgggctttcttagccaagtcctccttgcccagcaacaaaaggctggcctgtttctatcttaagatgatcggccaaaaatcagtctctagaactaagacaacttgagtagcaatatggtaaaataaggataactacagtaagggaaaaggaaggaggataatatggaagggattacactcacctttatctttatgggcctggccatagcggtcatgacttcccacaccaaggcaggcgttttactatcaggtttagcaaccgttttttacttctaccttgttgactttaacagttggattcccattgttttatttatcctaggcttactccttgttgtgacggaggtcttgataccagatttcggtttgattggattcttgggaatcgcttctgtcatcggtggcctctaccttaccttgggcgacttgggtcagaccatccaagatataagtatcgccatagtcattactgcaggcttagtcctttacctagctaagcaaggctactccctagccaactttagccgctttgttttaacctcatcggaagaaaaccagcaaagtaagaagaaaatcaaccgcaagctagaggaaggaaatgaaggcatttcagagacaacgttaagaccatctggcaaggctatctttaatgaagaggatggactcatctatgatgtccttagcgcagaaggccatatttccaaggggacccctattgtgatcgaaaaaataagcggaactaaaatactcgtccgtaaattaaagaaaaaaggagactagctaatggattctacactaattggcgtcattattgttgcacttctggtcattgtcgctttggccctcttcctccgttttgtccccatcggcctgtggatttcggcctacttctccggggtcaaaatttcgatcggaacccttgtggggatgcggttccgtcgggtcaagcccaattccattatcaaccctttaattaaggcaactaaggccggcctagtcttaaacactgaccagctagaggcccactacctagctggcggtagcgtggatgatgtcatcgacgccctcattgcttcccaaagagctaacatagacctggaatttgaggaagcagccgctattgacctggcaggccggaatgtttttgaagcagttcaagtgtccgtcaccccaaaagttatcgtcaccccaaatatttcagccgttgccaaagacgggatcgaaattattgctaaagccaaagtcactgtccgggccaacattgaacgcttagtcggtggggctggtgaagacaccattattgcccgggtcggtgaagggattgtcactactgtcggttcagccagtgaacacaagtccgtcttggaaaacccggactccatcaccaagaccgtattggctaaaggactggattccggtacagcctttgaaatcctatccattgatattgctgacttagacgttggccgcaacattggggccaagctccaaagagaccagtctgatgcagacaaaaatatcgcccaagctaaagctgaagaacgtcggtccatggctgttgccgaagaacaagaaatgcgggctgaagtccaaaaacaacgggctaaagttgtggaagcccaagccctagtcccacaagccattgcccaagctttaagagatggcaacttaggcgtcttagactacctcaaaatgcaaaatttaaatgccgataccgacatgcgccaggccatctctggcaaggacgacagcagtccacaagacggagagtaggggtttaaatgccacttttttacctctttagcctcatatttaccctcctgccctttttagtcatcggcttcatcgtcttgattatcttccaagccactagccagtctagaaaaaaggtgaaaggcacgctcaagccctcctccctacttgaaaaataccaggccgattgggtcaaaaatgcccaaaagcaagaaagacctaaagcaaatccaagaaggtctcctcaagcaagactcgaccaagacccaaaagcaagcaggaagaaaagaagacaaaaagaaaagcaagctaaaagaaaggcaaaacaatccagtaagagacaggcgagtcagcagactacagaaaaaaatcgggccaaacaagggtctaagactcagaaccaaaccaagggcaaccgctcgcaagcaaaatctgatccagactggtctggtgaaattaattccagctcgggcaaccagatctatcaaggagagattcagtcaatatttgataaaaagcagtatgatcatagacaaaacttgaatcaagttcaaaacttaggtcaacaagtggctaaaaacttgaagcgtgaccaactgaaacaggctatgatctacaaagaaattcttgataagcccaagtccttatccgatgatttgtaaaataggccctgcactaaatgtgataatagccataacaaccccatccagcttggtctgggatggggttgtttgacttcattaagtcagtgcactagggggcgaatatcttacaaagaataagtaaaatagaaacaaaattgtttatttttatcactagaaaatccgaaaatcacttcatatgtttttaataaatgtaaaaaattaactaaaaaccccttttgtgtgaaaataatgtcaattttaccttatagaccttgtggaatgtaaactttactactacaattgatatataaactatataaatagacttctaaggataccgactaatgtctgagaaatttgcaatagagattatcttttacacatcagaagggaagtataaaatgattaatctattcacatcaccaagttgtacatcttgccgtaaagccaaggcttggttagaggagcaaggtctagactataaagaaaaaaacatctaccacgaacctctaacaagagatgaaattaaagagatcctgatgttgactgaagagggaacagacgaaattatttcataccggtctcaggcttataaaaacttagaagttgaaatcgaagacttgtctatgaacgagttgctcgatttattcattaaagaacccagtcttatccgccgtcctattattatggacgaccgaagactgcaaattggttataacgaagaagaaatccgcactttccttcctcgtgaagcaagagaagtcgagttgagcgagatccgcatgaaacttgttgaagaagaaattgcataaatctctatcggtgttataactagtaaaagcaagggtctttcccccttgcttttattttggataaaaataggtccatcccaagcttgatagctcgggatggacctgtttgcatccaagcccttaaaagaccttggagaagttgggtgttcacatcacccaacttccgacacacgcttcccgcgctgtgcactcaagcacggtgccttgcttagatttgcctacatcagtcatgtagacgcctcgactcatcgcatgtcctcaagtctagcttatcctcgtgtaaaatgcaagtttctttcctcatatcttccagatgacctctacaagccttagttaatagtggcatctgaaactactaaaattaccattcttaccgttatcattattgacctagtagcccttgcaaaaaagcctactccctttttgaccgcttaacccaacctgtccgtggacttgggtaaaaaattttacgaaaatgaaaacgcttcttgacaacgctttctgttttgctataataaagttaaagaagcgatagtgaatgcttttaccttcgttttctttatattttaatcatctcctttctactaggaaagacccttgacctcccgtcaagggtctttcttatgggctttttcctatttaatgggctggtagtcttggtctccctatgtttttttatcaaagcaagacttgatccggttaagaccttcttggacattttcccggctagtagcaaagttaagtcgcatccaagttggggaagtttcgccgtagtttagtccattcaccaaggccacttgcccttcttgggtgaagaagtcttctaattctttcccttctagaccaatatctttggcgtcaaaccaaaacaagtaagtagcttccggtttgataaagtccacttggggtaagttttcttggaaaaagtcaacaatcaactggcggttttggtccaagtaagccaagaggttctgctgccagtctcggctttgggcaaatgcggcctgggtcgccaccaaaccaaagctggagatggccgaatgagccaggagggcttgggtagattggatcttgtctttcaattcttcgtttttgacaaaaatagctgaacacttgaccccggcaatattgaaagtcttggtagctgagtggaggacaagtagctggtcaaagtatttttcatccagggtataggctgaagtggccttgttttccggataagttaagtcgatgtgaatttcatctgatatgaggtaaacaccatattcttgacagagatcagccaatttcaccagttcttctctagtccagacccggccccctgggttgtgggggttactgaggacaaagagtttgacctcaccctttttaaactcagcttcaatttggtcataatccatgacaaatttgccagcttcaataatcagaggggatttaactattttacgcttgttggcccttagaattttgataaaaccattgtaggcagggtcatgaatcatcaccccatcatccttgccagtcactgcttgaatgacagctccaatagaccccactaccccaggagataggagtatgtctgatttttgcaggtccacctggtggcggtccttgtaccagtcgatctgactttggtaaaagtcatcagacggaatggtataacccaagacatggttgacagctaagtcttgtaagctttccttgatggccggtgcagggtcaaagtccatgtccgccacccacatagctagcaagttagggtcgtcacttccaaaacggtcggcaagcccatcccacttagcagaattggtctggtgccggtctcttacattgtcgaaatttgtcatttgcttccacctctctattttttcactctcttccatcataccacaagccaaaatcataaaggatatttttccctagaccaggcccttttcttaataaaaaataatggatgcctagcctagattttcctctttttaaagttagtgttgacagagttcctcattatctgttattattaactttgtgttaacaggcgcacatggtggaacggtagacacgctaccttgagggggtagtgggcttaaacgcccgtggaggttcaaatcctcttgtgcgcatcaatcaaagtcaagtaagcttaacttagcaagatttttattataggcatgcaaaataagtgctaaaagagcaagagtccgaaaggcttttgctcttttagcatacaaataaaccaatctaatctttactgtttgtaaagactagattggttttattaaagtctaacccttgtctaccatggttaaggaaatccggcccttgtctaaatcgacaccatcaatccaaaccgtgacaatgtcccccaccgatacccggtctctggggtggttggtgtagtccttactcattttggaaatatggactaggccatcttccttgaccccaatatccacgaaggcaccaaaatcaaccacattacggacggtcccttctaattgcatcccttccttgaggtcttccatcttaaggacgtcttggcgaagcaagggggctggccggtcgtcacgcatgtcacggccaggcttaaccaagccctggatgatatcctggtagctttcccgtcctaatccagttgcctcaagcaaggcctggtcgtcaaccttcttgacttggttagccaagtcttttgacccaacctggtccttgctaaaacctaattctgtcaaaatgacttctgcttcctggtaggattcagggtgaatgccggtctggtcaaagggttcagccccattcggaatccgtaagaatcccactgcctgctggtaggttttgggacctaaccgtttaaccgacttgatttgctgtcgctcggtatactggcctttgtcttcccggtaagccacaatattttgggctgtagcctgggtcaagccggaaacgtgttccaaaagactagccgaagctgtattgaggttaacgccgacttggttgacagccgtctccactacgaagttcaattggtccgtcaatttagcctgggataggtcatgctggtactggcctaccccgatcgacttgggatcaattttaaccagttcagccaaggggtcttgtaggcggcgggcgatggagacagcacttctttcttctacttggaggtcggggaattcccgtctggcctcatcgctggctgagtaaaccgaagcccccgcttcactaacaatgacgtaggctacaaatcggtcaaggtcttggaccacttcgctgacaaattgttccgactcccgactagcagtcccattcccgatggcaactgtgtcgacttggtacttttgaaccaggtcggttaattgggccttggcctcctggtattttttcttgccgttgtggggataaatgaccttaatggctaagaccttgcctgttttatccaccacggctagcttgcaaccagttcgaaaggctgggtccaatcccaagacgacctggtctttaaggggtggttgcaagagcaagttcctcaaattgtcgccaaaaacctggatggcctggtcttctgcggcttgggtcctatcagaccggagttctcgttcaatcgctggttgaatgaaacgtttaaaggctgcatcaatggcctctttgactagctggctggccgggttgtcaacttggtccggaatttcttgcttatagacataatcttgcacccggctaggatcgcagtctaaactgaccgacaggacgccagcttcctctccccgattcaaggccaaaacccggtggtgggcaatggttcggtaactttctgaatagtcgtagtaattctggtaaatacccttggggtcgtcattttcatccttgaccttggaagtatagagggcattatagcgcataaagtcccgcagacgcttgcggtattccggcttgtcgcctactgcttctgcaataatctcaaaagccccgtctagtgcagcttggctggaatcgacccccttatctgggtcaataaaatcctgggccttgatctctatatcctggtcggagaaggtcaaaagccagtctgccaaggcttgtaagccggcttctttagcctggctggccttggtccgacgttttttcttataaggacggtagaggtcttccacttcctgaagctggtctgcctgcaggatagcctcttttaaatcctggctcaacttgctctggctggcaatagactccatcacggtctctttccggtcttgtaagttttttaagtaatggtagcggtcttggatggtccggatttggacttcatctaaggcccccgtttggtctttccggtagcgggcaataaaaggaaccgtattcccttcttccaagaggtccaatacactggtgacttgcttggtcgtaaaatcactcaggtcttttaacaagtttgctttaattgattcttcaatattcatatactgcttctctattcctttccatcagaggtcaacgtttgtattttaccaaattattgatgaggggggcaatgaagttgctaggactttttgaaaggggtttttctaaaaaataaaagctgaccaagcgactaaacccttaaatttgttataatagtagtaagaaaatcggtaaaggagataggacaatgaattggaaaaaatggttgggcttaattgtcgtcctagccctaattgtttttgttggctattctttagtaaccagtggccaagaggatggggagggtcttgaggttcggactgaccaagtccagcggtcctctatcagtgaagaagtgacgagtcagggtctaattcaagccgttgaccagcaagaagttgtgggaaccggtttagtcaaaggccttcaggttgctgaaggagaccaggttgctgaaggagacaccctagtggattaccttgaaatgggggaggtcacagctgactttgacggaactgtcacccaggttaatattgaagctgatacagcagacagcaatgcccaacaaggccaaccctctatattagttgagagtttggataatctagaggtcaagttagacttgtcccaaaacgatgcccaagacatcagcctggaagattcggttagcttagactaccatggccaagaattccaaggccaagtcagctacctagccccatctgctagcaaccctggacaggaaagccaagctgccttgtctggccaacaatccagcaacaccctagaagcaagggttgactttgacgacgaccaggacttagaccccttggtggctggctttgaaattgacctggccatcaccgtggacgaaaaagacgatgctctcttggctcccattgaagctgtcatatttgacgaccagggtcaagctatcctctttaaagtagaagacggccaagccagacaagtccttatcgaaaccggtctccaatcagacttatacattgaggttgcagacatggttgatggcgaactccaagaaggcgaccaggtgattttatcaccggaagaaggcttagctgacggcgaccaggtcaaagtcaaagaccaaaaagctacaggctaaaagccttagttgagtcaagctgctatcctaggaagacaaggagtctttagcatgataaagattgaagatatcgtaaaaagctaccaaaccggtcaggaaatcgtcaaggcggtggaccatgtctccttgtcgatcgaagcgggtgagtttacggctatcatgggccccagtgggtcgggcaagtccaccatcatgaatattttagggcttttggacaagttcgactccgggtcttactctttaaatggaattgatgtgactgaccacgacaaggatgagttggcccggatccggaatgaagaaatcggttttgtcttccaatccttcaacctcctgccacggatgaacctcttggacaatgtcatgctccccttagtttatgccaaagtcccccttaaggaacgccaggaccgggccaagcaagccttggaccgggtaggcttaagtgaccgtctctaccatgcaaccaatgaaatctcagggggacaaagtcaacgcgtcgctatcgcccgagctatcgtcaacaatccttctgtcataatggctgacgagcctaccggtaacttagattccaagacgaccaaacagattatgaagcttttccaagacttgaatgaggaagggtcaactatcattatggtcacccatgagcctgaaatggctgtttataccaagcggattgtccacgtccgggatggccaagtagaaaaagatgaaaaaatcaaccaagaaatcctgaccagcaaggaggtgggcgacctatgattgtggaaaattttaaaatggccatggattccattgttgccaacaagatgcggtcatttctaaccatgctaggaattattattgggactgcctctgttatctcaattttatcagtggggaatggagctactgaagagatgacccagacctttgcggatattggggctacaacgattagcctggctgccgatcctgaccaggaagagcgggacttgatcaccctagaagatttagacttcctcaaagaaaacattgatgaaatcgagcacctgtctcccccaaaccaaatcaacggtcgtatttcatccaaccaatctggcaaccagttcggatttttgacctttgggacacccgacctccagtacttaaatgcccaaatggaagacactatcgtgcatggccgctacttcaaccaaaatgacctgcaagtgggcaatgatgtcgctattgtggattcggacacggcccagcgactctttaaccgaacagatgttgttggggaaagtatccagttcactgctcgcgataccactttaaacttcacaattatcggggtaatggaaggccggttctcagagctacagggggagtttgttgaagaaggcatgcctgtttttatcgccgctcccctgtcgaccattgaaaattatttccctatcgaaagccggattaataacgttttagttcaagttaccaataccagtgacattgagcccgtctccaaccaaatggtccggctcttggagctccgtcatgaccaggctggccaagatacttatacagccaccaactttttaaatgccctcaaccagctggaaggtttactaggcctctttatcaactttatcgcagcagttgctgggatcgccctcctggttggtggaatcggggtcatgaatattatgctggtctctgtgaccgaacgaacccgggaaatcggggtccgtaaggctttaggagccactaccggcaatatcttggggcaattcttgatggaatccttgattatcagcctcttgggcggtttaatcggtttggtaattggcattgtcgcctccaacctgatcgcttctgccttaaacattacgaccagcttaaccctaggagctgtcctcttagcccttggattctccagtggggtcggcatcttctttggctactacccggctaggaaggccgccaacctcaatccgattgatgccttaagacatgaataaaggtaaatagacaaaaaatcggaagaccctgtatgggttcttccgattttactttatcctaacttttttgaacttaccgcatggttacaaattcctcagctgaagttgggtggatggcaacagtatcatcaaggtctgccttgcttgcccccatccggatggctaccgcaaagccttggagaagttcatccatcccttcgccaaccccatggaggccgactactttctcttctggacctgcaactactaacttcatccaagccttttgccggtgatcggcaagctgggagtgcatggcattaaagccattggtgtagcacttaacctggtccttgccatactggtcgatggcctgggcttcggtcaatccaactgtcccaatcggtgggtgggtaaagacaaccgttggaatattgacgtagtccaagtgacggtcaggcatatgattatagagtcggtcagacagccgtctacctgctgcaatagccacaggggttaattggatggccccggtcacatccccaatggaatagatgtggtcatcagtagtttcctggtacttgtccaccttgacatggccttttttgtctagctctacctgggtgttttctaggccaagattttccgtattgggctggcgaccggtggcccatatgagggtgtcggtttcatggctagacccatcactgaagtggaggagcaaggaaccatcgtcttgtttttctacttccttgatttctttattgccatgaacctggaggccgtcagccttaatgatttccgtgtatttttcccggataaagtcatcgaacttggttaagggaaggtcccggcggaagaagaggtgagaatctgactccaaggagtgcaagaggccgtgaagttccaccccaacataaccagcgccatagatagccacccggtcaggcaggtcggtcagattaaaaaagccgtctgagtcgatgccgtattcactgcccggaatgtctaatttttcaggccgaccaccagtcgcaattaagatccggtctccagtgtaggtttgaccatccacatccagggtctggctgtcaataaaacgagcagtcccggtgatgtggtcaaccgagttgctgtctaggccattttgataggcctggtggaggcggtcgatatattcttcacgatttttgactaattcagcaaagttcaaggacttgccttgggtcgaaatcccatagcctgggccgtaagcatccaaaccgtggtaggtcttagctgcataccacataatttttttagggacacaaccacggttgacacaggttcctccaagttggttgcgctcaattaaggcaaccttggccccccgttcagctgcccgatttgcagaagcaatcccgccactgccaccgccaattacaaggtaatcataatggtttgtatcagtcataatgtcgctccttttactagtttcttattcaatttatcatgtatggggtaaatgtcaatccatttaacctagactccctttcctcacaaggttaggtcctagctgagattttgctttatcataaaagttccgctatactacaagcaaataacttagaaaagagagaagccatgcttgatgcaaaagaatattggattttgttcaaatcaacctttaccctcagtgcctttagctttgggggaggctatagtatcgtccccttgatgcaagaacagtttgttgacaaactccactggattgatgaagatgaaatgctggacctggttgccctgggtcaatccgctcctggccccattgctgtcaatactgctattttgatcggctaccaaaaggatggggtcttaggagccttgctttcaactttgggaacagtcctcccacctctaattatcatgactttggtctcctatatctatttttttatccgagacaatgccttaatcaacaatatcctgatgggcatggcaggtgggattgcagccattattgtcaatgccgtctacaatatggccaaacaaatagtcgtccggcgcaatcttgtccaaattattgtgatggtcctggccttggtggctgccgttattttccagattaatatcatttatatattaattctagccgcaagtgtaggcctaatcaccagcctggtcaagggcaaaggaggtcaggcatgatctactggcaacttttcatcacctttatgaaaattggggccttgagcttcggtggcggtttagccgtcttgcctttaatcgaagaagaactggtccaaaacttgtcctggctcagcctggaggaatttgtcgatgtcctgaccttgtctgaaatgaccccgggacccattgccattaatgctgcaactgctgctggaaataatgtggctggggtgacagggggcattgtagccactattggggtcgtcctcccttccctcttgattgttatggtgctggcttatatctactttaaataccgcaatctttccctcttccagggagcgattgcaggactccggccagcggtagtagccttgattgcctctgctggtgtcaccattttcatgaccgccctcttcaatacttcttcatttgacgtgaacttagccgacctcaacctcattaacttggctatcttctttttagccctctatggcttgcgaaaaattagactgaccaccatccaaaccattattttgtctggcctggtcggtggtatcctcttctccattttgtagacgactacaatttataaatgagtcggtcgactttcttgacggttccattatcaaaataatcgaacttgacccagaaccgaatcaaaattttatcaatagtgttagcttgtccttcaaaagcccagcatctcaccctttaaatccagcagccaaagcaaaaaagccctgaacctagccttacagccaggttcagggcttctactatttagttttatttatctaaagaatctttttgacggtcaaagaccacattcggccgttggttgtgaccgtagatttttggcataaatgctcggtcaataaagggtgcacagatgttcataatgataacagaaataccgacagcaccagggaaaccgattgctatccggagtatcaccgtcaaggcaccggcacagaaggcaaaaaccgacttcccttctggtgttaaacagcctgaactgtagtccgttaccatatatgtagctacaaagaggaaggtaccggacaagacgtgggtcaagctgaagaatggatcgaagttaccccagaaggttgcgactaagaagccacctaggataaagaggaggggtactttagggttgatgacccgtctgacgatcaggtagatcatcccaattaggattgccagtttggaggtttcaccaatgtttccaccaacgtcaacacctaagaagaggtcccacaagtcaggaatttggctggaaatttctgttgccccccggttcaagtattccaacggggtggcagttgccacagcgtctacaccaaagccaccatatggacctgagaaaaacccattgggtaaaatccagttggcgaaggctggttggaataagatcttggcaacaactcgggcggtaagggctgggtttaagtagttgcggcccaatccccctggtccaaagccaaaattccaatgcttcacaattagtacagcgatcaaggctgctgctgcaacgacccacaagggggaagatacaggaaaggacagacctaccaaaagaccggtaacgaaaacactgcggtcatagagggtgatttttttgtcagataatttctggtagccatactctgccaaggctgacaccccaaccccaacagcaatttggacaaagacccaccagccaaagaagtaggctgctgcgataatgggggggaccagggcaatcatcacatcagtcataatgtcccgggaccgacgcttacgtcggatgtgaggggagggagaagattggagttgcttttggacttcttcaatactaattgactgcgacatgttattcctcctcttcttttttggcattaatagctgctttagcgccacggatgttgtcaaggagtggaatgttggatgggcagatgaaagaacagttaccacattcgatacagtccatagctcctagtttctcagctttatcaatctcaccgcgttcgaaggcttccgagatcaaaattggttgcaggctgactgggcaaacgttgagacactcagcacacataatacagtcttcccgttcttcgacttcagcttcttccttggttaagatggttaaagcagtcatccctttgggaactggaacgcctaagtcggtgatgactttccccatcataggaccaccagataaaattttacctgggtagtcaataaagccaccacagtcgtcaataatggagtccattggggtcccaattttgacttttaagtttttgggttcttttaaaggcgctccggctactgatataatccgttcagtgaggggttcacctaactcacaagcccggtaaattgcccggcaagtagacacattgagcaagatgatgtgtttgtctgctggcaattcatctggttttacttcccgaccagtgaggttttggatcaagtttttctcagaaccttgtgggtacatgtgaggtagggtgcggacagtaacctcattcatgtggctagtttcatttttcaagacttcaatagcgtcttttttgttgtcttcaaccccaatataagttttggtcagccctggatataatctagaaataatttctagtcccttaaccacttcctgggcatagtctaacataacacggtggtctgaagttgagaagggttcacattcagccccgttgaggataatggtatcgatgctggttccttctggtgggtcgagcttgacagctgttgggaaagttgccccacccatcccaacgataccagccttccgtacggtatctaagatctcatcattggacaattggtgggaacgaccgggttcgataatgggatcagcctgggtatacttgtagtcgtttttgataatgatacttttaacagtcccaccgccatcagaaggtcggtcttcgatgccgacgacctcacctgagacaccagaataaacatgggctgagacaaagccaccttcttctgcaatcatttggcccgctttaacttcatcgccaacttctacaactggttctgccggagccccaatgtgcattgcgatggggtaaaccattaattttggcacgctagcatcaacaatttccttgtgctccgtgtactgtttattaccatcagggtgtgatcctttttctttgtgcataaaagaaaacgccatgataattccttccttccgcttgttcttcgcttaacaatcgcacctgtagctcgctacaaggccaatattatttatgtaaataatacctttagctagagtatacattattctcattcttaattaaaggctaaagtttagcattttcacttttattttcagcaaaaatgactggatttttatctgtttataatcattacaaattaacttttcttataagtccaaacctaacaagtaaacgtgctatattttaggaaaatctaaatatgtaagatcctaaacaagctaaaaacctactagaatctcaaaaaaggcaacttaaccgggatatgtccctgccaagttgcctggtgaagtgagactattctcacttaataaaattttatctttctgctaatggatcaacttttttaaagggttctcggtcattgtagcccatacccaaaaagggacggtcggtatgaccgtataccttgttgaaggctaaccggtccacatatggaatgacggcattcatggttactatggccaagcccacaccttctggggcaaagccctgggtcctaaacaagcccaccaggagtccagccccaatgggaaagacaatttgaccaattcgggtcaggccggctgttgggtaatcggtcaccataaagacccctgcaaagactagggacccactcagtaagtgataggccataaattccaagtccatgcctccataaaagtacataaagatcccaacagtcgcgatgaataaaacaggtttgtaccaaacaatgacccgtcttaggatcaggtaaaccatggcaatcaagatcaccagggtggacgtttcccccatggcgccaccccagccaccggtattgccaataaagaggtcccacaagggaggggctcctgaaaagtcgcccccgccacggaagttaaagatcaggggagtcaccgttgtataggcatctggccctaagttagggacataggcttggagggaagccgtcgaaacctggtccaaggataggccaaagaaatcatttagccagccgacaaattggaagttaaaaaaccaagggaatagtaagtggatgaccctggctgtcactgctggattaaagcggttggaccccatcccaccagggatcagcttgattaagatagccaagagggctaccaggccagtagtggcgtagagggtcccattgggcatggacaaggctactaagatcccagtgataactgccgacaggtcacgaatggttgaccgcttgcgaacggcccgctcatagacccactccactaaaacggtcactgccacagcaatggctacatggattaagacagtcggtccaaataggatagcacctgctaaagttggtagcattagggccaggataacttgcagcatttgccactggctatcccagccttcaaagatatgaggcgattgatccgttactaagtcataatctgctagtctagtcttagccatttttatccctctctttcccggatggtcactttggccttacggatattttccaagagagggatgtgggatgggcagatataagagcagttaccacattcaatacagtccaaggcccctaattcctgggctgcctggatatcccctctttcatatgcattgctgattaaaataggttgtaaaccgactgggcaaacattcaggcactcagcacaccggatacaatccatccggttccgctggtcgacttcatcagccgccaggaaggttacatgggttgtccctttggaaattggaatgcccccgtcattaatagcttgacccatcatcgggccgcctaagagcaccttgcgtggagcttggtcaaaaccgccacactggtcgatcaagtcatccaccggtgttccaatccgaaccaagaggtttttggcttccttaatgggactccctgtaacggtgaccaccctttcagttaagggcttacccagacggacggcctggtagatggccaccagggtcccaacatttgagaccaggcaacccacatctttaggtaggccacctgaggggacttgaagtcccttgcagacttcaatcaatttccgttcagccccttggggatactgggttggcaggagtttcacctgacatttactatagccagtctgggctatttgcttttctaaggcttggccagcttgagccatatccttttccaaggtaatggtgatggtcttgacttcaaaaacctggtcaagtaagcggatcccttccaggatttgctcgctcttttcgaggatagtccggtagtcagatgtagcatagggctcacactcggccccgttgacaatcaagtggttgattttttcgccttcgtcttggatcaatttaactgccgtcggaaactcggcgcctcccatcccggcgataccagcctggcggattaagtctataattgtttctggttcaaggtcctccccataaccagttaaggccggagcctggtcatcctgataatcattcttgacaatgacacactccaactgccttccattgagcatacggttttcgaccgaaataacttgaccggagaccgatgaatgaatgttggctgacacatgtccctgggcttggcccagaagactaccaatcttaaccgaatcaccaaccttaacaactggcttagctgcttggccaatatgcatggtcattggaaagactaaaatccctggtgcctgggcctttgtgatagcctggtctatgcttctatccctgttgccttctaaaaaggtccccccatgataaccctttaaaacaaatcgactctcagccatacccaaatcctcctttattatagtcattctcaatagtcttataattttaaggaaaacgcttataaattctacttataatataccgaaaaaaatcttagcttgtaaaggtttattcccaaattcctctgctttttaggcgaaaagttgaaaccagggcttaaactggtgaaaaccaagcaaaaagagttggccaagttgccaactctttcctgactttaaactattcgatttcctggcttaaagcaatcatccggtccactgcttggtctaagtaatggatggtgtccgccagtggtttttcagtgtcgaggtcaacgccagctaccttacccgcttcgatcggttttttagtcccaccgagcttcaagaagtctagccaggccgaaacatcaatgtcgccttctttgattttcaagaaggcctgggtagctaagtgagtcctgctgaataggtgtaagggtatagacccatgtaatagtggacttgccgcatccaggttaattctgctcctggttcaatttccacagcatcgccccagaagtcttctaagacctgtcttttaatttgacttaacttgtcagcatcaaagcccttgccttggtcaattaaccggtagacttccctttggtaggccgcttccaagagatgggtgacaaagttgtggtagtaggtcttggagatcattttggagataatggaccgctctgctctcgggctagttgcctccttgcgcaagtagtctgacaggagcaattcattaaaggtggacggtgcctcaattaagtaagtggagggtctaaaggcggtctggacttgattttgggctgccaagtagccctgtccagcatggcccaactcgtggattagggtgtaagcgtcacttaagatacctgaccaggacaacataatgtaggggtgggaggcataggcttgggagcagaaggccccggaccgcttaccaatattggaagcaaagtcaatccaccggtcttcataagcttggtccattatagccacatagtcttgacccagaacttgggttgcttgcttaaccaagtcccttgactcgtctacggttaagcgttcggtgtaatccgggtccaagtccatcttcaagtcggcataggtcatcttgtccaagccgttgacttctttgacatgggtgatgtacttgcgcatgacaggggcaaagtcttccattaacatgtcaatttgccggtggtagaggtcttgatttacatcttggtcgtctaagaggtagtcaaagactgtatcaaagccacggaggtttgccataatcttgtctcttaagacatggttgtagtaattggttgcaaccgtatttttatactggcccaaaaccttattaaactggtcataggacttccgtctaacttcttgagattcatcgtaggcataaacttcctcgtaggagacaaagtttagggggtattcccgaccttgggctaggaaggagccataatctgcatcagcagaccgggcctgttcatagatttcttcgaaagaatttaaaacagggcttaagctagccaaagtttcttctactttcgggtggagttggtgttgtttcagtttaatgatattctccacaaaggtttggtagttgtgatctaaatctgccacttttcttaagacttggtcatccaggcgagtcaactctgaattgtaaaaactcagtttagtcgatacttgagcaacaattgaagaggttttttgggaccggtccttggccaagctgtcggtgatgtcaacagatacaggtaggtaagagtattggtggatgtcttgcaagcgggctacgatatcctctaaatctttaactgaggtcaagacaccctctgggtcctttagctttccttggtatttttggacaaattggtcaacgtccttgacgagttcttccagagccaggtcaaaatctgcttccgtttgaaataatgaagtaagatcccacttcagaccagggtctacttcagatcttttgaataatttatctgacataacgatctccttaatattctttttggtagtctattttgttgagggccacatcctgctggttgatataagaggacaagtttgcttcaataatagggaacaaatgagcattgtagtcagccatttcgccagcaatatggggggtgatgaggacattatccatctcccataggggactggtttccggtaaaggctcttcttcaaaaacatccaaaccgcaaaaggcgattttcctttcatttaaagctgccaccaaatcttctgtgaccacactggggccccgccccacattgataaagacagactggtccttaaaggcctggaagcggtccgcattgtaaaggcctctagtttggtcggttaagggcaggatattgaccactatatctgcctggcctaaggcaaagttaatctggtctgccgggtagatggcatcaaccggggcatctgtagtccctgaccggttcacaccgaccacttttaagccaaatgccttggcaatgtcagccacttttgggccaatattgcctaggccgaccacagccaaagtcttccctttcagttcaaaaaggtcaacatcctcttggccccaatacttgtttgcttgatagtggcgggattggaaaacttggcgcgagtagcccaaaatcatggcaaaaacggtctccgtaatggcttgagcatgcatgccggaagcagacgttaagatgattccctggtctgctaataagtccaagggcaggtagtcaaccccagcggacttggcttggatccacttgattgagtggtcgccctgggcaatcacatcttccaggtccgaatcccatcccaagacaatctcaacctgagaaaaatcggcttcttccaaggtctggattaggtcataatcctgggctaggtcctggattctgtccaggtaggtctgactatagtcaaccaatactaaaatttgcttagtcagctttaaaacctccttttttatattatgacatattgtcacattttttgctattgcttaagatccttgaaatcattttccctctaaagttctagggggcggatcctgtatcccctataggctcaactgtcccaaagcctggcttatcgtttgccgagaattatttttttgctagaatgaaagttacaaagaataatggaggttatgcgtatgtcagaagacaaagatcaattagaaccaagaggaagtcagcccaaacaccagatccaagcccatgaaaaaggccagaataagtggcaagtttacgatatcctttacttaatctctggcattgtgggcattattgctccctttttaccctttgcccaagtctcggcttttggtttctccgagtccacaagcctaatggtcgctaacggcaatattggagacggcattttttacattatcttatttattatcggacttgtcctcttcttttttaagaaaaagttggggatgctgatcgttgcaatcataacaactctttttggagtaatcactttcggtctgtatatctacagcatgagccaagctggacggttaagtaattgggttaacctacaaattggcgcctacctcctactcctatccatcatcgttttcttggtttcagctttcttatcctacaaaaaccgagcttaacctagttaaaccaagcttgagccggccctccgttatggtggccgactctttttgtataaggggccttctaaagtctaagccagctaagcaaaaaaccaccctgccagaaggcctggctagggtggttttttgattttttattcgacggcttggtagactcctgtaatgaagtcaaaggcctcgatttccccgctttcaaggttgcgacggaaaagggccaccaggttagtatggtcttggcccggcatgttttctcgaacttctacctgcaaccactgaccatcttcttctaagtgggttaagtagaggtagttgtcggtattaccgtccaagtagggttggactgcttcaatcgactggtcagcctggtcttggctaacctctccttgtccgtcctggttaggatctgcttcagcttgtttgttttgaccaatttggctagatgaagccgactcacttgaatttcggccttgaccaggttggttagaagtagaggcaacttggccaccactccctgactgggattcttgatcctggtcgtctccagcttgggcttggtcatctcctccgccatcctgactgtcttggccgtcacttgagtctgggtcagactctttttggtcagagtcctcttgaccgttgtcttcctggtcttcattatcatcactaacttggtcaccaggctggtcctcattagactggtcgtccgcggagttttgacttgcttcttggctctcttcttctacaaccgggtcttcagcttccggtgctttggcttggtcatcgttaaagcaagcagttaataaaaagggcacagtcaataggtataagtactttttcatcaaatggcctccttagggtcagtctaggtcgtggtaggcagcgtaaacctgccgcttggaaatctggcgaatcttggctacctctttaatagcagccttgctggataaatcttggtctgccatgagcttggccacatggtcttcaagggaataagcctgccagtcctgttgatcctggctttgtggattgtcattacctgctactattataacaaattctccccgcaatgggacggtttccaggtaatttaatatttcttttagctctccccgaataaattcttcgtactccttggtcagctcccggcctaaaaccaggtaacggttgggaccaaagacctggttcatggccttgaggcattttttgagccggtggggagactcataaaagaccagggtctcccttttgtttaccaggtcttgtaaacaatctttcatttgcgacttacccctgggcaaaaaaccatgaaagtagaagggttgtggcgggatgccagaagcaattaaggcagtcagcccggcattggcccccggcaaggggatcaccgatatgccttggtcaagggcggcctggaccaattccatgcctgggtcgctgatggaaggcataccggcatctgagacttgggcaatggactggccagattggaggatgtccaccaattcagccagcctggattgggtattgtgttcgtggaagcttatctttttggtgtcgatgccaaaatggttgagcaacttttgggtatgccgggtatcttcagctgcaatgaagtccaccgacttcagggttgctaccgcccggaaggtcatgtcgtctaagttaccaataggggtgggaacgaggtagagctggccggcatggtcatctggtcccttaaaacttctttggattttaacttctgcttggtcttgactgggcttggccacgccttattcctcctcatctctgataacactcttccgccttcggtcaaagggaagctttacccctttttgacccaaaaaagcttcctttttaggccgggtgagttgcttaaaggcatactctgcttgcatggctaaactcttagaagggtaggcctgggcaaaaaggagcttgactggtcgcctagactggggcctagtatacttggcccccaccccagcactatgctgactcaagcggcggcttaagtttgtagtatagcccccatacaagctgtcatctttgcataagaggacataaaaataacttttaaccatttccctttaacacctggatcatttggtcggtatacttgcttttgtcgtccataatataaaaaggtgagtccatctgaaagccagctttagatccctctttgatcagtttcactaaaaagaacttggatgatttattgaccttagggtaaaccagctggatttgttttgggactagcctataagtcaaggactggtcgatcaattcgacgagtcggtccgtcctataaaccaggtaggcaagacccttgttcttcaagagtcgggccaccgcctcaagcaagctagccaggtttaaacttagctcatgccgggcttgggcataggctgccagcttattttgcctggtcttgcttgactgaaagtaaggcggattgcaggtcaggcagtcaatgctagcagctgggacttgctggctgtaatccaccaggtcagcttgaaggaagtcaacccggtcacttaagccatttaaactggctgaccgcctggccatgtcaacgagtttttcctggatctcaacccctacaagcttggcagaagtttggtcggctaaaaggagggtaagggcaccgttccccgcacagaggtctaagagcttggcatgtctagacttgggcagctttgcaaagtgggctaggaggatggcatcaacagaataggaaaaagtatccctgctttgaataatttgacgccgacttggatacaagaggtccacttgctcgccagcttttaatggaatgtcacttgtcatctgtcttcctcctagctctgcacttctcccccttgcctttttaccaggtctaccggggactcgtttattggtgaatccaggcacttgaagccgattatgaccggacccagctagctttaatcttgtttttggtctcggtcaccgtaaataacttccaggcaaaaagcacaaggggagtccccctcccggcgtttgccaaaaaagaggttgcagacatggaagccatcttcataaatattttccaagtttaaccgggacttggttaaaccagaggggttgttggggtcagccggtggaacttggtccggctcttggctgtcagggtttttttggcttaattccgaatccagtcggtccctcaggtattggttttccatccggagggtgtggttttcttgggtcatttcggacacttcttctttaataccagctaattggtcagccaagtctttggcctggttctctaaattgaggatggtatcatataggtcttttttatccataagtcaccactctcttaactccttgttcaatttggctgcaagccctaaacccggtcctgcctccttgcctgaatccttgcttaacagcctgtagcaagcttaaaacgcttagcctatactttcctgcaagtccaaagtcaagccttctaaaacagcctgactggccacattgtggtccacttctcttttagcttgcagggtggcttgcatggcataagacacttgcttgatcgaaagcaggtccataaagtagcggaggtcactttcgtggcctgcgaagcaggccggactatctaaatggtagtgtaagtggagcaggtcttggaagaggtagaggattaagtcacaaaccatctggcagtcatcccggtcttggataaaggccattaagtctctttggactaggataaaggccaagtcatcttggttcatgagatagctaaaccactgccaaattttttgactgactgccagcaagtcctcttcctcaatgagggacttagccaagtctaagtcttggctgaggtggctggccaagtgggcttcttcctgggacaaaccggcttccactaagtcctcaatccgagtctttaaatcctgcttggcaaactggataacctggcagcgggaaacaatagttggcaaaaggttttgccggctagtaactaacaagaaaatagtcacatcccctgccggctcttccagaaatttaagcaggctgttggctgcactgggggtcattttatcagcctggttaaggataatcattttcttttgactctccacaccagacttgcttagggcatccttgacctgtcgtacccggtctaccctaatcgaccgtcccttcccctcaggggctatttctaccacatcagggtgttgaccctggtcaatgcgcaagcaagtgggacaaacttggcaagcttgtccctggtcttggttggggcaaaacagtctcttggcaatataccggctcatctccagtttgcctgatccggccaaaccttcaaaaagataggcatgcttgagggcatggttggccaggattcggtcaaaaagttggtagacccctgcttgtttttctgctaagtccatcatatcccaccttgtggctaactggattaaaactgttcaaattggtcaattgggaggacaaagactgtcgcccctcccacttcgacatcgattgggaaggataggtccgattctagggtaaagtcataagaaggtgggttgaccatcttttgttcccgggttgaacaattttcttggatgatatttaagacaaaatcaatgcggtcgtcatctgcaccaacgataaatgttgtgttccctgctcgtaaaaaaccaccagtcgatgataatttggtagcccggacaccattttctacaaattggtctgataaacgtttactgtcttggttttggacaatggctacgacaagtttcattttgcttcctcctcatgatgggactatactgctagtttaagtttaacttaatttcccaattctgcaagtccttcccttactgcctgccaggctatgtcggccacctggttaaattcttggctagcgtcaataacaataaagcggttagggtcatgggcaattaaagtatggtagccttgacggacccggttatggaagtgaatgtcctccaactccaagcggtccctgccccctctggcatttttgggggcgatccggttgagtcccacctgggcatcgatgtccaaatagagggtaaggtctggcataaccgactggatggcaaaatggttgatggaccaaactgcctccaggcccaactggcgtcctgctccctgataggccaaggaagagtccacatagcggtccgatacaaccaccgctccggactccaacttgggcaggatagtttctaccaggtgctgacggcgggaagcagccattagtagtgcctctgtcttgggatccatttcctgatggctggtatctaagatcagctggcgtatttcttccgccaatggactgccacccggttcccgggtctggacaacctctttattgaagtattccctgatcttcggcacaagcacttggatcaagctggacttgcctgacccatctggcccctctaggctaataaaaatccctggcatcttattctcctaacttctacatctctcgtctgccttcaaccgccttgagcaaggtgatttcatcagcatattcaatatcactaccaaccgacagtccatgggctagccgggtcaccttgatgccagaaggtttgatcaagcgggacaggtacatagcggtcgcctccccttcggctgtagcattggtagcgataatgacttcttcaacttcattttcctggagtcttttaatcaagtcggcaatattaatgtcttccggacccgtcccttctaccggggacaagatgccgtggaggacatggtaaagccccttgtattcagacatcttttccatggagaggacatcccgggcctgctcgaccactaaaatagtggactggtcccggctgtcatcactgcaaatactgcaagggtcctcttcggtcatattgccacaaatggaacagtaggtcaggtcacgctggacgctaatcaaggccttggcaaagtcagtcacgtcctcttcccgcatcttgacggtgtaaaaggccaagcgtgccgcggttttctcaccgattccgggtagtttcatataactgtccatcaagcgggcaatgggttgggggtactgcatcaagtcaccttctctatcaactttccttaaacgttgaaaatcagagtggttcaccactctgatacttccgaacttgccttcatagtaacttctctatggccaggcaaaagtttatttaaaagcctggtaaaccgcctaatcctttggtgtacttgcccatgacacgttcagtttcctggtccaccttgtccaaggcatcgttcatggctagctggactaagtcctcaatgatttccttgtcctccgggtccacaatctcttctttaatggtcacagcttggaccttcttttccccatttaaggtgacttggaccaagtcattgttagctgaaccagtaaattggctttcgttcaactttgtctgagcttcttccatctccttttgcatcttcttcatcttcttcatcatgccttgcatatttcccattccacgcatattgcataaactccttaatctttgattgtaatattgtctttaccgaaaagctccacagccttgttaagggcctggttgtcttcttgacctgggtcatcatccgacttgccgtcacttgcttggccagctttagtactgccatcttcttttttcatctgcttgataaaatcgcggcggatagtcggccacttgtcttcaggcacacagaccagtcttggacggcggccgataattttttcgatgtaattgccgatagccgtttgcaaggtctcgtcagactctgctctctcacatagaatatcatattcaaaggtcaccaccaaaccctctggactagcagcaactggtttggaattgtttaagatagccttttgactgatggtcaagacattgatcaagtctggccagaggtcttggaggtcgtccaggtctttacgggtcgcctggtccaagatagagtaaacggctttccggttaaccttgaagccttgctggtgacggtggcttctagacttgccagggccagattgcttggggccagcttttgacttagctctttgcttaggcccttgtttggctccagcttgcaagttttgaatactttgctggagggacttgacctggttttgcagttgggcaatctcttctttattatcctggtccaccatgttgacttggctggcctggatggtctgaacggctgaagaaggctggctaagcttgaccgtggctatttccaaatagacttccccatggttgcttaggcggagatcgtcttgggtttggtttaagacatcaataatatggtaggccatctccttgtccaagtccttcgccaggtcttcaaactggtcgtctaagcgagccaatttaggaacaaaattatcgccttggctagtttggtaaagcaagaggtcccgggtcatcataatagcgtcttccacaaaccggctagggtccttgccttcccctaaaacttcttgcaagagcttgagtccttcttccgtctgaccttggctaatcacctgcaagtattcaagcaagagagactgggtaatgctccctgtaatctggagggcaacttcttctgttaactcatctgtcataaagcttaaggcctggtccaacatactcaaggcatcccgcatcccaccttccgctgcattggctaggcttaggacggcttctttgctgtaggggacctggtcttcttctaagatataaatcaagcggtcgatgatgtcctggttgtcaatccgcttaaaatcaaaacgctgggtccgggagataatggtagccggaatcttgtggggttcagtcgttgctaagataaagaccacattggctggaggctcttccagtgttttcaagagggcgttaaaggccccagaggataacatatggacctcatcgataatgtagaccttgtaaacggccgaagttggggcataattagccttttccctaatatcgcgaatctcttccaccccattattgctggccgcatcgatttcgatgacatcgcctagactaccctgggtgatctcctggcaaatctgacattcattacaaggctccccatcatccgagtaggggcaattaatggccttggcaaatatttttgccacactggtcttgcccgtcccccggggtccagtaaacaggtaggcatgactggtattatcatttttaatggcattctttagggtcttggtgaccacatgctggccggatacatcagcaaaactttgcggtcgccatacccggtataaggcctggtgggtcatagctctcccctcctaaacatcgtcactttattatataagaaaattcttcttaattatagcctgagccataagaaaatctgtgtccaagacttagcaaatcttggataaagtaaagagccagcaggtccacttcccactgactctctacactatgaatataaataattgctttaaaagcactatgtaatatgtacgcatgacacataacggagcaatacttagtgctgcttctttccagacctgacacggttcatatgtccgctattgtcctgcgctatttatatagtaacatagccccggtaaaaagactaggaaaattcgcaaataattccaaataaattctagattttcttttcgtcaacctgctgacctaacctagctgacctcatagtgaaaaaacttgttatccttgtgattgtgaaatgtttcataatagaactaagaaggtcttgaaaataacttaatgtaagctttatagtaaagcgatcagctgaaaacacttacttgaaaatttacgtgaatttgtattgacttcacaaaataagggcgtataatcggtctcgtcaatgataagaaagaaggtatcggaatgcactatactaacgctattgtagttgttggttttacatttattcactatttttcgaaatttttccatttaaataaacattctttgattgctaaattttcctctcttgtcggcggggtttccattgcctatgtcttcttccaccttttgccaagcttaatccactaccaagctgatatttctactgcctacaatctatcggctactagtgccttccagcttttatttgctaccatcctatttggcttaattgttttttacttcttggaagtggccatggagtctagccgtttaaccatgaccatcaaacgtattaacaaccaggacatgtctgatgctagttttgaagaagcccaccaacgtgtcttttgggcccacatggcaccctatgctatctacaatattatcgtcggtatcctcctagcagaccaaagttttgaatccaccaccactgccttgatctacctcctaattattggcttgcacttgtttaccaacgattgggttttacgccaccacttcacccatctctatgacaagttcggtcgtggaattatcaccttcactgttttgcttggttggaccattggctttgccttccacatcaaccacatctttatcgccctattagaagcctttgtagctggcggaattatcctcaacgctatcaaagatgaactccctgaatgcaagggcagcaacttcccacttttcttaatgggaactgcggcttactccctcttcttaattttcatctaaggcaacaaccatttccttccttggttaaactaatcaaggaaggtttttttatgtttatggtctgggggaagccttgcccaaaaaagagaccccctctattttttagggggcctctttttctttattaaactattttggatagggccaaaccagcaaactgaaaagctttaagagttttttaactgtttttggccttgcggttgctccgcatcaaggaccaagaccgtttgatttgctgcataaagttttcagaagagtaaaccaagacattgctccggtaaaagactaaagatagccaggtaaggaagatgaggaagacaatattccctccaatcgacaaggctagctccaagccccctaccgtccccatggccatgcggaaaggcataatatgaggcatgaggaaaggcaggtgggagaggacattgaccaaaagaccatcttccaagaccccgctttggatgaagaagcccaagtaaaaaccgaagagggctaggaagacaaggggaaccataaccttgttggcatcttctgtcttggtgaccaaggacccaaggaaggctgaaataacggtgtaagacaagacccccaaaacgacgaagaggactgacaaggctagcacaccttgaacacttgccaaggactggcctataaattgcaagatgatgtctaacagttcattctgtcggaggaaaaagaagccaactagggctaaaagaaagtagatggccaagtggacaaggagagtcaaagccaccccaaaaagcttgccaaaaaagtgttggcttgcggtgatactggagaggatgacttccatgacccgagaccctttttcattggcgatctcttcacagatcataccagcataaaagaggatgaaaaagaaggtcactaggttgaccaagacggccaagaccatttgcatatctgaagcactaaatagtgcaggggcagggtcctcttcagctaggaaatactggttatcccctatgtcaactccttgtgtcaaggcagtcaaatcttcttgagagatatccaactggtctgccctcgcctgggcctgactttgactcaattgaccttcaaggtaggggagggcataagacaagttgccctcatggtagagggtggcttcaacctggtccctttgcccgctgatttctaaaatgccgtctatctccccgtcttggtaggcttgcttggcctggtctaggtcgggataatcttggacaaggtcaagggaggcctcttcttggccgtcccaggtctcatcccctaagaggtcttctgggttactgaccagggctatggtgtccacatctcctgcccccgtacccggatcggacgaactcgatataaagtaagaaatcaacccgataatcaagggaaagacaatgggcatgaaaaccataatataaaaggaccaagattttaaattctttaacagcgactgccaagcaacgattagggtcttgttcatgacttgccacctaccatttctttaaagatctcttccaaacttgggggctgctggctaaactggtaaatatagccgccagccgtggccaggtcaaagacggccttgcctgcttcggggtcagtcaggtagaccaacttcttgtccccctttaagtctaggacccggctaactccagctaggtcactgagggcctggctggtaaccggtgcttccaggtaaaccttggtccgaccaaatttttgccggatggagtccaagctcccacccaaaacacggttgccatctttaagcatgacagcagagtcacaaagttgctccacattattcatattgtgactggagaaaataatacaggccccacggtcagctgcctccttaatgctgtcttctaataggtcagcgttaacagggtcaaggccagaaaagggctcatctaagataatcaaatcgggctcatggatcagggtggtcatcaattgaactttttgctggttccccttggacagttccttgaccttgtctgtccgcttgcccttgacttcaaaccggtccatccagcggtcaatcaggggttcaatttcttttttcttcttgccctttaacctggcaaaataatagacctggtcttcaattgttcgcttggggtatagccccctttcttcaggtaggtagccaatatggttgaggattgacttgtcaatagccttccctttccacttcaccgaacccttgtcgggaatgaacaagtccaaaatcaagcggaagctggtggtcttccctgacccgttttggccaattaatcccatgatctctccttctttgatggtaaaagacagttggtcaaccgctaccacatccccgaaagttttccttaaatccttcacttctaacatgctttgtcctccattacttgttggaatttctagtcgattgttacaggacctccttctaggacagctattcttgctaacggtctttcttttcttttttcttccgggccctcaagtctttaaagaagctttgcaaaaggttttggcagtctgcttggagaagacctggaataacttctgtttggtggttgagccggtcatcctgcaataaattcatcaaactgcctgccgccccactcttggggtcataagggccatagtaaacccggcgaatccgggactggacaatggccccagagcacatgggacaaggctctagggtgacatagaggtcacagtcttccaagcgccaattgcctaaagtgtggttggcctggcggatggccatcaattcagcatggagggtggcatcttgtgacccctctttttgattgtggccccggccaataactgtcccatctttcaccactacagcaccgatggggacttcccccttgtctttagctagcctggcttctttaagggcttcttgcatccatttggtctggtcttccatcaattcaatccattctatttctactgcctgttcatgcttggcctacacatactcttcataaatgtctgggtgctggttttccacccggccggcctccccctggtctaggttattgagggccttgatatcatcagggtccaatttaaaatcaaaagaggctaagttagccccaagatggtcctctcggtcagcccgaggattagacaagatgccagcctggtagttccagtttaaaatcacctgggctgcttgcttgtcatacttgcgggccatgtctacgaccctttgattgtttaagacatcatttaagatgccccgaccaaaaggtgaccaggcctccgttacaatgcctcggtcttggttggcttgcacaacttctaagttattaaagtaggggtggcgttcaatttggttgctggctggggtcaccccagtctctttgataagtttgtccaggtggtcaggctggaagttagagactccaatggacttgattaaaccatctttttgggcatcaattaaagcctgccaggcttccacatactggtcttgcatggggaggggccagtggattaaatacttgtcaaaatagtccaagcccatgcggaagagggattcttcaaggtatttgatggccttgtcatattggtgggcagccccgggtagcttggcggagacaaaaatctcttcccgagccaaggaagactggcggatagcctggcctagcatcccttcattgtagtaattagtggaagtgtcaaaggcccggtagccaaggtccaaggccttttgaattgttcctagcccctcttttccttggatccaaactgtccccaaggccaaagctggatagcggttgccatcattaaaggtaaagtatttcataatgtatgatgatacccctttctttaacttgtccttatattagcataaatataaccataggggtaaatttccccctaaaaaagcaaaaactttacataaataaaacaaaccggcaaaggcctaactgcctctaccggtttgactattctctcttcttcgccttacttaactgccttttttaagaagttaacagcatcactgactttgtcctctaattggtcttctaagtcgtttacactgtcaaaagttgacaggaggttattgacactagtgtcatccaacttgtcaacagccttcaagaccttatcgttcccgtctaatttagtccggacaaggtatttggctcgttgacggttgacgagggcttttgatttttcttgaacttcttcagaagacaagaagatagcaaatacacctaggccgactgctgcagctgctcctaaaccaattaagattcctttgttatcctctaattttgacatatgaatcagtcctttttaatctattaaagccattttaacataaatgggaagttggcgcatcccattccctttaagccttactggtttcggcttcttgactgcgctcccttactttcaaggtaatggaccccttgctagctccaatggttaccttgtctccagcaataatttcaccgctgagcaaggcatcactgagccggtcttcaatttgggtttgaagggcccgtttcaagggtctcgcaccatattcagggtcgtaacccttatcggcaatcacgtcaattgcggctggggtaatcttgagatcaatggctaggtcagccaaacgcttgattaagtcctctgcgagcaagcggacaatgtcatgcaagtggtctttgtctaaggtgtggaagacaatggtttcgtccaggcggttgataaattctggtcggaagtaatctttgagctcatccagcatgcgtttgcgcatggtctcgtagtcaaatttcaagtcttgtttaccaaaaccgacttccttgtcatcccgtaagctggtggccccaatattggtggtcataatcaagacagtgtttttgaagtcgacctggcgccctttaccatctgttaactgaccgtcatctaagacctggagcaacatgttaaagacatctgggtgggctttttcgacctcatcaaagaggacgaccgaataagggttattgcggattttttctgttaattggcccccttcatcatagccaacatagcctggaggagaacctgctagacggctggtggagtgtttttccataaattcagacatgtcaatccggatcaggtcatcttctgacccaaacaaggtggctgccacagttttagctaattcggtcttcccaaccccggtaggtcctaggaagataaaggatccaataggacggttagggtctttcaagccagaccgggcacggcggatggctttggaaacagccttcaccgcttcttcttgaccaaccactcgttcatgaaggttgtcctcaagttggagtaggcgctgactttcttcttttttcatttctttgaccggaatgccagtccattgagcaacgacatcagctatatcctcgcccttaaccttcggccggtcagcttggccttggtcttgtttttctttgtaaagcttttgaaccttgttttgttgcttcatttcttgcttgcggattttagccgcctcttcaaactcttggttttggattaggcggtctttttccttgtataggtcattgagcttctcagttgcttcattcaagttagactggccgtctgtctggtctaatctaaccttggctgaagcctcgtcgatcaagtcaatggccttgtctggtagttgccggtctgtaatatagcgggtggacaacttaacagcatgttcaactgcttcttggctgatctccacgccatggtggtcttcataacggtctttcaagccatttaaaatttccaccgtttcggcctcgctcggttgcttgaccaatactgaagcaaaacggcgttcgagggctggatctttttcgatgtgtttctggtattcatccagggtagttgccccaatggtttggagttctccccgagccaaggctggtttgattaagttggaggcatcaatggccccttcggcactcccagccccaatcaaggtatgaagttcgtcaataaataagatgacattgccgtcattgtaaatttcattgatgattttcttcatccggtcttcaaattcaccccggtatttggtaccggcaaccaatgaccccatgtccaaggtcatcagtcttttattttgcaagacaggtggcacttccttgttgacaatcttttgggccagtccttctgcaatggctgtcttcccaaccccagcttcgccaactaggaccgggttgtttttggtccgccggcttaaaacctgggtaatccgcctaatttccaagtcccgacccacaatagggtccaagtccttcttagcagccatggctgtcaggtcccgggctagggcatccagggtcggcgttccgccagcttcctgactgttggccgggtgcccccccatgccttgtttacggctccgggtccgtctttgtccctggcggctagcctggtcgctgatgccaaatttttctaagaccaattgtcggacggaagacaagtctacagctaggttctctagtaattttgcagacagtaatttgtcatctctgagcaagcccagtaggaggtgttccgttcctacttttttccgctgcattttgcgggcttcatccgctgcatactggactacctttctagccttgtaggaataaggtaggatggcattggagggcagtttagagtcttgggcaaaggtgacaaagcgttctaattcatctctaacatcttgggtggttaaatctaattcccgtaaaaccttacctgctatgccttcttcttcctcaatcaagcctagcaacaagtgctctgaaccaatggaatagtggttataggatttggcttctttttgggctatgagcaagacctctttggccttgtccgtgaatagttcttccatctaatcattctcctccgttcgtcaatgattagttttttcatatcgtaattcttttaacatggattttaaaatattggctctgagtaattcatcaacggctaagtcacctgtgtaaagcgttttctccattgcgacaagcattaacttagcttcccggcgactcacaatttgctcttctaatagttttttgacaatcgaaacagcatcacgttcactgattgttttaccgatgatggctatcatcttatcaataacatccgcttcttccaagattttaaccttagaaattcggataaatccacccccgccccgcttgctttccaccaggtaaccttgttggacggtaaagcgggtgttgatcacatagttgatctgtgagggaacacaatcaaaccggttagcaatttcactacgtttaatttcgacttcttctttgttactgagtacttgttttaaataggcttcaatgatatctgacatgtgttggtatcccattttattctttcatttaaggtaattgctggaatcatacaaaaaatgacccgacaattcaagttaaacgaaggttccctcctttatttttaaaattttgactatatttgaccttaattcattatagcaagtttttgcctttttggaaagtttttaattttacttgcaagcaaaaaagcacccaaaggccactgcctttaggtgcttgctttactgagtagaatagacgattagaggaagtaagggtcatcgtcagcatcgatgactgaagtgatttcgtcatagttggtgtcccggccttcttccggcaaatctttagctgattcagggtcagccggttcagtcggcacgtttttgtcttcaaagtctcggtcgttggacttggctaggttctcttctgtatcctctggccaacgttccaagtccacatcatcaatatcaatccccaatgcttgggcaacaccttcaccgtatttagggtcagcaaagtagcagtgacggatgtgacggtgtttgatttgtagggttgagtcccccatgttgcgggcagtgttttcaaacaagacctgttgttggtcttcagtcatgcggctgaagaggataccaggttgggtgtagtaatcgtcatcatcttcacggaattcgtggtagtctacctccccacctgggaatgggggttcagcgttttcggggtggtcgacccagttaccgtaggagttcactccattgtggatttcagaaccgccattgccgtctacccggccttgaccgtcccggtgttgggtgtggaagtctttaacacctttcggctggttgacagggatttggtggtgggtgacacccaaacggtagcgagccgcatcgccataagcaaagacccgggtcattaacatacggtcaggcgaaataccaattcctggtacttgggttggctggggaagaggcaaaactgttccacttctgcaaagtagttttctgcgtaacgatttaattcgtattccccaacttcaatcaatgggaagtctttcttgtaccaagacttggttaagtcaaatgggttgtaaggtaggtttttggcttcttcttcagtcatgacctggatgtacatcttccatttcgggtacttgccttgttcaatggcattgtacaagtcgacctggtgggattcccggtccatccctaccactgcttcagcttcttggtctgttaagttctggatcccttgttgggaacgcaggtggaatttaacccaaacccgctcattatctgcattaatcaagctgtaagtatgggaggaaaatccatgcatatggcggtaagatgaagggattccccggtcactcatggtaatagtgacttggtggagggattcaggcaagcgggtccagaagtcccagttgttgttaggcgaccgcaagttggtgcgggggtcccgtttaacggcacggtttaattcgataaagtgtttaggatcacggatgaagaaaacaggggtattgttccccactaagtcccagttcccttcttcagtatagaatttaagggcaaaaccacgaatgtcccgttcagcatctgccgcaccgcgttctccggctacagtggagaaacgttggaacatttcagtttttttacctacttcagagaagatttttgctttggtatacttggtgatgtcatttgttacggtaaaagttccgtaagccccagaacctttcgcgtgcatccggcgttccggaataacttcacggttaaagtgggcatgtttttcgagcaaccagtggtcatttaagacacctgcaccccgtttgcctgctgtcatggagttgtggttactggtgactggaattccagccgcattttgcaagcttggatttttgccgactcgttggttccggcttgcttccggcttgcctaatccatttttgtccattggatttttcataaatcataacctccgcaatttaatcaattaatacttgttagcttaatgttaccctataatgcttgcggtatcaatttttttagcgtatttccttattaattatatttattacttacctagcttcagaccaggtagtagttgttgaattcattttaattctgtggtgttaaaatccttttttaccgtgtgattagtcacgtagatacatatggatcacgcatcctttctattggacaaactcacaaacgctcactactcggtcaactaccattcgctcaccaccttagctaaataaagcaaaaaagtacaaggccacccttgtacttgctatcctggcccttaaagaagtgaggttatcctattgctggttctatgatgtaacccaatcacttgtaaccaccttccataccaggttcttgctttcttacccacactatagcatgctataacccccctgtcacttgctaagaactggtcaagggcaaacttaacactgcttttacaatccaagtttgtaacaggtcttcctgctagtttactggctggtgggataagcccggtcctcggttaagcattagtttggaatgggatatttcttgtgtttttttaccaaaatttaatataataaagtatatttgagggggccagccatcatgctaaacaaaaaatataccaagcgagaagttgatatcttagagacactctgggacgaaggcaagcctttatccgttaatgagattgccaactccagtggtattagcaaaaatacggtcgctccgattttaaaaaaattactggacaagcactgtatcaaagttgaagatgtcttttactctgccaaatcccttacccgaaagttcctccccctgatggaccgggaaaaatttatcatagatgcctttcaaaatatacatattggcaatttcctaaaccactacttagaccgccactgcgaccaggaaatcctagacaggctcgaagctattattcaggaaaaaagggataaacttcaggcttgaggtcaagtccatgctctagccaacacaaaaaaaggacgatcacttgtgtcatcgtccttttaaaggattaggggaagtcctagttccccctctccctatccgtagcacaaaacaggaggaaaaatatgtttagatgctagctgttttttatgatggtataaacgataattgttttaaaaggttaaaataaaaacctgcttggcaagttcaccctacaaaattgctaggcaggttttgacttgctttttgactaagttattcgccccagaatttttgggcaatttcttgaccttgcttaatcttatcccattgttggtcgatggttaactcattaccgatatcggtcgaggcaaagccacattggtgggacaggtagagcttgtccttgtctacatacttgctggcttcttcaaggatcgacaaggcccggtctgcgtcatctaaatggtccgtcttactagagagaaggcccaggaccacctcggtatcaggtcggtcactgaaggcttctagagcagtcaagctaccgactctgtcctcatcgtcccactctaagaaaaagcggtcataacggaggttttttaagaagctatctgaaatagactcataagtcccatccgaaaaacttctggaagcatagttgcccccggcagttgtgggtataaacttttaagcctaaatcatgagcatagtcaataatttcattgttaaggtcaataaagtcttctggtcgaacttcaaaattatccttgtttttaataaatgggtggtcttggtctgcaaagagctcccagaggcagtcatccaactgaatggtcttgccgccaattgccttgtagtcatctaggaagtctttataagcttgggccaaatccttacgaaattcctcttccttcccttcataatagctaccctgtaattggtcaaagacgatattctcgccataaatatgagaaggagagggaatactgagcttcaagtcagccccatctggtgcaaattcgcgcagacggcggtagtggtccaagaagggatggttcttcccatcaatggcttggtcaaaggtcgtcccaatatcgcgacgggtttcataattggacttcttattgtctttgtcccggaagaagtaaccctggtcagtgatataacggcgggccccatttaagccccaaacaaagtctgtatgccagagtgatctggggtattccccatctgtcaattccgggattccgacttccgcctgcttggccacaacctctttaacggcctggtcttctacttccttgtaaccatcaaagtagtcataaaaaggataggaaatatcctcggctacttggattttatccctgtatttgagtaattcttctggtctgagcaatgatccaactgttaaaaaacggttcgatgtggtcatcatcaattcccccttacaagttgcttgacttgccgatcaactagtcagcttctcctggcaaaatagcaaaaacttccgcattaaaaccagtcaagccaacaatatttggtacagcaatatgaatcagggcccctgtagccggtaggtcagcaagtcccttgatcacttccacttggtatttatcttgcttgagccaatataattccccgggattggctcctgtttctgcaatggcaataccagcgtctgtgtttaaggtttcgtgcccgattgccgtcacatctctttcctcatgaaggaattgcaaggcttcaatggaccaacctggtgtgtgttctaccccatcgctatcacggttatagaagctatccggctggtcaaaacggtctgaccaggctgtggccaaagcgacaaaagacttggccgggatcttgccgtgtactttttcaaaatccttgatatcttcaaccccgaccgtgtaatcgggattttctcggacggcttcctccttgtgaatcacataaagtggcagggtccgttcttttaagcttaaggcagctaattcacgagtccccttagcgaaatggttgggcgcatccacgtgggtcccgtattgggtcccaatttcgacttgttggccccagaaaccatcttcttcgatggtggcaatagttgttacttcaatcggactaaaagctgaaaaatgtgggatagtcgagtcaactggatgactcaaattgacccactctcggtctttcagttgccctaataattgctgtaaacttgtcatgatcattcatcccccctattatcattctgggtataaaaaaatacccatccctttgctgactactagtagtcagcaaagggacgagtatctttcgtggtaccacccttcttcacggttgcaattaagccaaaccgcctcttcagcacatcatcccctggggaataataagcctagccagataacggtcgcacccgtctagccagcgtgaaccgactagattaccagagctcatcttcatttgctttactgctttcccttctcaccaaacgggaatctctgctaacaatgccacaaactactcttctcttaaagttctttgatttagctttgataacaatatatagataaaaccattaaatgtcaaggggaaggctcattttaaacatatattttttaagaatagatgaaatgattgaaaataattaatttttatcattcacgataaatctaatctgttattccaaaataatggatatcagttcactagagataatatgtgttttactgatcaaaatacaatagaaataacgttactacagactacatacatgctttttactaactagttagaattaataaagctgtacttcttcaaaaattagctcttattctacttttacaaacctactaacctttcctattaatctaaatgtcgactgtcaatatataaaatttatattataacttatttacaataactttttattcccgtataattcatgattaggaaaacaacaatcaattaggagaattaacaatgtcaaaacaatattatgatgagaacggcaatccagtagtagtgaagaaaaagggcggatgcttaaaatgggtgattggtatagtcctattaatcatcctaattggagcttgtacgtccttatttgcagaagaagaaaccaaccctaacgataatcaaccaactgaaactgaagaaacaagtgaaaatgaagaagtagaaagcacagaaaatgatgtccctcgagaatatgaaaatgccttggctagtgcacaaaactatgtggatataatgcctttttcagaaaaaggattataccagcagttaacatctgaagccggggatcaataccctgaagaagctgctcaatatgcaattgaaaacgtagaagtagactataacgaggaagcacttgaagctgctgaaaattatcaagataccttcccaatgtctgacgctgaacttttcaaccaattaacatccgaagctggagaccaattcaccaacgaacaagctcaatatgctattgataatttagaagactaatacccaaactcccgaatgacttttggtatgttcaacaggtgaaagttattaatcagttaaacgaaaaaccaggaagactgaaatcagtcttcctggtttttatagcgcaccgtataagatttaaaatagcctgaaaaatgttgtcatatcaggctttataagggtatactataagcagtgcataaagagtgcataaatgtattttgtaacgatattaacataagcataggttgaaaaacctatgctttataattatttcgattgaatttatatgccataagtgatataatatatatagaaagaaggaggtgagaacatgagcttttcagagttagctgttttcattgcaggaattggaacattcctaggaggacttggaacgcttattcaagctctgaaagaaaaaacgaccactctgccaagtaagtcgtctagggaacaaaggggactcacctcctcttcctgttcctattataacaaaaaataggagggatgacatgaatgcattcatatttacactgctatgctttttgattacgatgcttttttaccacaatatagataaggactagataaaatgtatgctgactctgaaaagatcaaaaaactattagaacagaacagtcaatatcgcatttcaaaagaaacaggcattaatcaatccatcttgtctagagttgtgagcggcgaacgtaagatagaaaatttaacctttagggtggctagcactctgacggaatacgctgaaaaaattgagaaaaaagaccaatcttaagcatgaaactatttttgctaaagtaaagcgggcgggtttaaccgccccttttctatgtaaataggcaaggctcgtaagccctgcccttgatcctacttcttatggtcgttcgtcgtggaaggtcccccacgctttgtttcctttgccgctttctcggtaaggcaagtagcgtacaccgttttcagtgtggtatctaagccatctgtatccgttgccttcatacacagcaaaatagtgaatgctttcgccttttggaagggtgccggtgtgtttagcgtcggtagaaggtttgtctctgactttgattttttcgtttgctttgaaataagcatcttcttccttcaccagcttcgcgccggcgacttcttcggggaagccagatgttttttcttgagtgccttctgcaatgaaggcgtcccctaatttgtctttggctttttcaacttctttttcggcattttctttattgctaaaagcgccagtttggacgcggtacactttttcgtcggtagactcatcttcttccacgttggcggacccgcttgatttgcccgctaaacgatctttaaagtcttgccaagtgatccctttttcaccatttcgcaagaagtgcgggcaatcttttcctgaccaatgattgtgttgaacaacattgtcatttgaaatgttgtgacgttcttggagttcttggactaattccaccagattttgaatggttttctcaaagtccccgtcagcgttcacgcaagtttcaatgccaatgctgtggaggtttccggtgccgttagcgccatcaccagcgtgcatacaagaggtggtatcaagaaatgactgaatagcgcctttatcatctacttggtaatgccaagaagcgctacggttgttgccatttcgttgtagttgagcgtgcatttcggcgtctgcgccgttgtcggtgtttgctgtttcgtgaatagtgatatagtccgttttattgttggttcctaaaatgactccgttcgcaatgctattgggtacaaggtcctgcttgatacttaccactcaatatcatcctttcgcgcttcttctttgtccttatcgtatcgatactcaccagtcttgaatatcgttcctaaaaaggtttgaaaggctgctaatatggtgagaatggtcccgccataggctacgcctaaggcttcaaatacgacacctaaaaacgtaataaaagctggtagcacgatcgctatcagccacttcaggatcttatacgtccggtcacttaaccgcactctgtcacctcctttcaagggttcagtttgttcttgttcttttcgatacgttcgccgtgccgaataatattatcttcatttcggccaattcggacttcatgattgtcaatgattttcttcatgtcggccgcttctttccggctttcctgcatatcgcgggctaggctgtcaatgctttcctttaaggtcttcattgtttcatcattgcgcttcattgtggttcgaaaaggttcaacgactaatttagctagcgtgacaatcgcaataatggcgccggcaatggtgccaatactgacaatatcgatttccaaatgtttccctccagcaatgtattagtcctcttcgccttgctgttttcggtgagtaagtcctgtcggttgactttcgtctctagtagcttctacaccttgaggagtcccgctaatcagttgggtgttggatttgttctcgcttttatttttgcttcctttacggttcgattgactagcttgaatacggtcaataagcttgctttcgttagcgctttgacgtttgacgaattcaatataggcctcgtggatatcttcgtgatatttctgatagtcttcttcgctaacgtcaggcgtcaaccaagcattgtaggtgggcaaacgagtgccattcacactggctgaaaaacggactatctgacgtccatcaatgtacaattgggcttcttggttatggtttggggcttcgtattgtaaattactcatcaagtgcgtcctccttcactaagggtaaaatgccttcgatgacatagccttcaatttccggcaagtcatcaagggttagctgttgcttaaagctgtaatccacgtcttcgtctaatattttgttttcttcctggctgattaactgtttctgcgtttgcggcggttcatcctcaatttctttggcgtatttctgaagagactccaccgcactttcgacatatggctctaaatctttcttcgctcgaatcattttaaaagatgtttgaggcgataactttttctctagtagcttgtttaagcagttgttggcatcgacaattttccttaattccatcttaatcatccttctagttgaagtttggattaactgggttgtacgtcccttctgtgttccgaatgtaaacattaccattattgccaagaaaaataccggctcggttactattgttgtgttctaaaaacagaccttgaacatcgccgaccttcccttcttttagtcttagtccgttgccactagtgctatgtttgacaagccatgtatcgagcaataagttttgtcctatgacctctacatcgccttctgaagtaactaaaaggccaccattcgttgggtccccgccatattgataattaactcgaataccgtcttttccaatttcgtctacagcatacgtaaatttaagaccgcctgggatagacggggatgggtgtaaattgtccatgaaaatacgtcccgtttgaccatctacacctaaagctcggtagaattgattgcttccttgtgggcgaaaagacaaaccgacataggcttcatgttcagcacccaatgaaactgaatatttattctgaaagattccaccttcatcaacagctcttaaaacactcatttggccatgttcttgaccgtccttccagaattcgataccatcttcggatagcagattagctaatgacccgtcgttacggtaaatgtgaaggccttgcccgtttaagtcaatgttccggtttaatccctgaataccgagttgaacaaatcggcctttgttcccagtcaaactattgacgtctaggttaacaatgcggacttgattggcgttgagttcacctgacgtaatcttgttagcactgatattattggctagcatgttattggtgatcacgccattatcaataacggtttgagccgacacatgaaggttttcgccggcaatacgcacaccgcttggggagatgttgatttcagaaacaatatcttccccgttcatcttgctgttttgcgccacgttttccacgcggttgccaaccgccaaccagatgctatcgccggaactgcgaatgatcgagtccatttcgcctcggctaactttcgaatcaatttggcctgcgaggttccggatttccgttttaagcgttccgtttgcgttatggacatcatagcttaagccgttcacagtttgagtgagacgggacacatccccgtttacattgctgatatgactatctaaagcgtcaacggtttgcgtgatttgaatttgattgccttccacatctgaaatacgggaatgagccgaattggcgcgttgttctacactattaatatctccttgcgcgctggtgatttgtgcgccatgactttccaatgtttgccaaatgagggagtcagccccggtagcactcttcacggtggaagcaataagcccctctagttgcgtttgttgactgcgcaattgcccctcaactgttgattgaaggccgctgattaactggacggtttgactaaagttttcttcgtcggtatcttcaatgagggtgattaaactatcagatgtctgttgcatagccgaacgcaagttttgctctgtatcttccagttgggattgccaaatatcagctgtggcaatgagtcggctagcaaaccctttttgcgtgtcctcaatttcctgttccaaacccgattgattaattttaatttgtgtttgtaagccattttcagtatcgtcaatttttaaattcaaatctcgtaaatctttaaaaataccggaaatatcattttcaaacactttcggctcggtgtacggggtggctctaaggccttcttctagctggatatcatccacgtgaagggtgccaatgcagtcactggggatgatgacccggttcgtatcttccgtggctctaaaagtcgcttgaagccgtccgtctggtccttctcgaacaggaacagactggttgccaacgataacctccaccttgtggcctcctttctatttaaattggactacaacggtttcgcctgcttcgattggattgagattgtggtcacttaaacttccacttagttgaagggttaggccattatccagaacggccgaaacttcatccccgctaatacggcctgaatattcaatatcaatataatcgatatcagacggttgcgtaccctctggcaaaggatcaattaaataaatgaaagttgagccaaaatcgacatcaggcgttgcaacctcagtctctgtaatgaaagaatcgggtactttcgaccaaatcgtttggccgttgctaatgacgcgttgaacggattgaccgttaatataaatattctgatacataagcacctactctttctcaaacacgattttgccagacgtattagcagggacttgacccggccctacaatttgaacttctaaccaatcacctgtttgggcgtcttgaactttgcccacctgtgattgaagttgagaagtttcactaagaagaaaagcgatatcctgaaaattgttttgcgaactttgactaatattattgagctcgcttcgcaatcctcgaacatctgctatggcatgcgtgtggtctttcaaagcaaccttgttttcatcgttccaatttttccaattatcatcggggtcatcacttcttcgataaatgactcggccatcgtctgcaacacgaacgacgttaacctttttgtctaattcattttctaagccaaccacatcgctcatgctgtggctgtgtcctttatcagatttgctagctaggtcagattttgtggcgtaactggttaaatcaatgcctaaatcgtctaagtcgtccacgttagccttattatctaagctagcttgtaagccggtgatgtctgaaatcgggtgcgtgtggtctttgagcgccacttgttcgctcgaatcatcggtttgccagatgtaatcttctgaattatagtactgaatttcgccatcatcattggctcttgctttagtcgcttttgtgtcaactttttcttctaatcgtgctaggtcgctggcgctagccccaatgtcaatgttggccaagtcggattgactagctttactatccaactgactcggcaatcctatcacatcataaaggctatgattgtgatccttgtcagccttgctctcaatcttactatccaagctagcgaatccttccactaaagctgattgtgaggcaaagtcgtccaagtcttcttctttgacgtattcggataggtctataccagcattggaaatttcaatcttttgttcttcggtcagatcgtcatattcaaaaggttcgcctttggggcctcttggaccacgctcaccttgcggcccgcgatccccttcaggcccttggagttgagccagttgggctggtgtaaaatcttcatacgtgaatggttcgcctttaacccggcccaaattctgttcagtctggccttctagcttcacgtggaggtcttcatcgtcaaggcggacccattgaatggagtcaccttgttcgcccttttcgcctttgtcacctttagggccttttaaggcagctagctgtgcgggtgtaaagtcctcatactcaaatggctcgcctttcggtcctcgcttcccttggtgacttttcaggtctttccatttcttttggccatcgccaactttaataacttgtgtgtcactggcaacgccaatttcgccttccagtaagacaatgtcactcgccaaccattcttcttctgttttggtgacttgcttgacacgtccttttagcgtttcaaccatctaaatttcccccttccatataaggtctggatcagttgagaattgaaagagtcggtcactatttggatcatcttctaatatttctcgataagctaagctgacatccacgcggttgatttcctttaaagctttgacgggcaacgtttccgtttgataccaatcgcccgtgatttcggtttgataatagtcggggtaaacctctagtttgtgtgggctggttgtcgtggtgtcggtcacttctggaaattcgtcttgcgttggtagcatcttgatggtgacttctttcaagcttcatcgccgccttccttatcgggtgcgtccaagttaaagacaacagtgtttttctccatcggttcacaataggcgtcaaaactaatggtatatagctggccggcttggaagcctgggccattgtggtaaacctcgattggatcgtcacgaaactcgattttcccgcttgtgtcaccttccacacggttacggctgtatcgagtaacaccatcgcttccaatcatgtcaagcgctaatgctgcgctgtctgacgtttccgctagttctttttcaataatattaatttgccgttgattgaaaccggcttggcgaatggctttgtcgattttgtcagtatcaatgccgttttcagcaaggtcatcaatatcgttccgaatggcttccaagtagtcttcaaaattatctagctcttcttcattccgcttttggagttgtgaccacttgtactcaaatgcttggagtttttgctccgcttcttttaggccttggttgattgcggcttcatcaatcagcagttcccaagcttcgccattccagatcaataattgggtttcccctggtattgaagggtgatcacgataccataggtccccggttcgcttgcgttcaggttcaacattgccataggtgatgctattgaagccatcagctgatagaagggtgtaggataggttcgcttggctttcttgaatatcggatacgttttgttcgatgttgcgaatattggcttgtcgttttgtacttggagtataaacaacgtctcctaactccacttgggttttatcgtcatttaacttatttcgcacaactttccgaacacgtgtttggtagtgaatatctaaatcatgacggtggatcgtaacagtgtccccaatacccgttgcaccaatattggccacggtggctttaaagagaactttcgggcgggcttgcacttttagttgctcataagtgagttctaataggcgttcaggatcttcttcgtcgtcaaaaccgacgatcccaatacggggcgctttctttccttcaatatatgggatgccaaattgatcggttgcggttgggtcttctaagtaaatttggcctcttggtttgtctagcgggtctccgtttgcggtggaccattcaacgccggcgaacgttagttttcgcccatagccagcttgcccactgtcgttatcttcgtcgcttgatgtctgttcacctttgccgcgtccaatcaaagcggtataaatctcatcgcgttgggtctcccgcacaacagttaaggcattggacccgtacgagtatcgtttttgcgttttccggcccatttcgtgataagcttcaacccatttgtccgtaatggattggccagccatttcaactttaaacgcaaactccacgccggtcaggtcttgcacgtgcttcaaggcttccttaacactggtaaagtaaaattgcgtggtaacacttggtaaaccgtcgtccatatagccaggttgccaatcggtgtgcttaagaagattgcctagcacttccgctaagcctctaccgcgtggacggtagtctttaacgatttgcccttcgagttcatacactgctagttgaacgccgacaaatttcatggtgtcatctggggttgtttcgttgacaatttgatacatatcaaaggcttgctcatttccacggtaagacttcacggccatgtattgggcgtttgtgagtcgtttatcgccttgcaccgtcacttctagggtgtcttttaaaaggccaccatcatccggcaattcttgcgtttgaatggctgaaaaggtagccgtatctggcacaatttttagcaagtcttgattgtgatcaaagaaataaattgccatgccttatagccacctttctctagcttttaattcgaccgtcccctgtggacatcgaacggtgttcccttgcgtcagtcgaaagttttcaaaatcactatttaaatcgaccatataggttgcctcttcgccagctaccgtcaacgtcatggcttcacgatcaaagcggaaaatcgcgtcgttcccaccgttaaatgtccctgtagcagtaatggtatagttgccatcagttacttctagttcgtttgtggtgctggtcacggaaaccttgatctgttcgggcggggttggataaaaagtatcgatcgtcacttccccgctagtggtttggattgggccaaacttgtaaggatcagggcaatacagaacaaaggttcccactttatcattcgtatgatctggcggggcttccatttcgcttagtagaccaaggtaataggtttttggttcatcacgaaagcttatgattaaattgcccgtaaggtgctttcttagctttttaaagcgttgctggagcgtggttccgtcattagcttttaaattataggtcactgtgatttcacgggctggtaaacgattatttagcaccaatgtaccggttggaacttcttcgggttggatctcttgactgagtgtttcccgcccgctcacttttaaggttcggtagccttcaatcacttggtctaaggtttggccgttgaggctaagcgctacagaagataggcccgctggttgatctgattgatcggttaaactggtgtaatccatgctaggcctcctttaaaattgtagttctaagtcggtttgacgtccttgttcttgcgaaatgttgtcgacaaaggcagtaaagttttggccaccaatggacaagtttacttgcataggttgtttgtctaactcaaggtttgaaaattcatggtgaatgtgactgttgacttgagcgttggcgttgtccacggcgttgcgtaagcctagattggcatttaatcgacgctggtttaaaataccttgcacacgatctaaagcactcgaagtagcagtagccagcttgtcttcatcgcggttgatgcctttggcaatttgaccaacgatgttgttgttttcaatgccaaccagtggactggatttgtctttaggtggtgagaatgggaggaagtccttaacagcaccaacgacatccccaatcgcatcggtaaccctaccaacggcacttttaatcccgtcggcaatactgctaacaatatttttaccagcatcgacgaaatcgccaaagaagtcggtaacagcatctaaggcgtcactcatgccgtcgctaacagcttcgaccacatcattaaaggcatcgaccacaacgccgaataaatcgccaaagatatcttcaaaggtactaaaaatggtgtccagaaaatcggaaatggtctcggtgatattgttccaaatttctcttgttttgcgtttgattttgctccaaatttcaaacactttgttcttgatactaccgaaaatatcactgaccgtttcttttaaaccttcccacttatcggataaccaagtggtgatattgttccaaatttcagacgttttatctttgactttgtcccaagcttcggtgatcttatctttaataccagtaaagacctcgatcactttggttttcagattttcccatttttcagatagccagtctttgatactgttccatatctcggacgttttttctttaactctgtcccaagcttcggtaatcttgtctttaataccggtaaagacctcgatcactttggttttcagattttcccatttttcagatagccaatctatgatattgttccatatttcgactgttttttctttgacatattcccaagcttggctaatgaaatcagagatggcttcagccgctccgccaatggtttcctgaatgttttcccacgcggtgacgatgaattcgcgcaccgtttcatttgtgttgtaaagataaattagaacaccaataaagattgcaatggcggcgataacgaggccaattgggctaatgagaaaagcaaatgccgcttttaacaggccaagtactttgccgaataaggcactgattgcaccaccagcttgaaaagcaccagctaatttggtgacgccacctttaaccagcgaaagcccggcggccaagtgtggaagaactattaaaagtttacctaaaatccaaaggaccggcccaatagcagccgctaacccaatcatttttagaatatttttttgggtcccttcatcaagttcaaggaaagcatctaacgcttctgttgcactatcaattaaacttcttaaaggcccttcgattaaatcaaatatggttaagccaacttctcccaaagatgatttaaattctctaaaggaacccgataggttgtcttctacttgacgagcaaattcctccgcaaaaccagtggaattttcaagtccgttttgaaattcacctaaagcatcagaaccagcatctaccaatgcggtccaaccagaaacagcgtgcgatccaaataaagtggctaaagcagctgttttctgttcgtccgacataccagctaggccagtttctagctctcccacaatttctttcatcggtttcatttgaccgttagcgtcaaagaaggaaaggcctagttcatccatcaaggctttttgttgagcggttggggccgctaagttgagtagtccacggttcaaaaccctaccggcttggctggcttcaataccagcatcacccatgataccggcagctgctgctacttcttcaaaacctagccccaaaccggaagccacgggagcaacatatttaaaagtttcgcctaagccagaaacagttgtattagaaccggcagctgttttggccagtacatccgccacacgagaagcgtcagaagcttccaggccaaaccctcgaatagtccgagcggtgatactagatgcttcatccagtgaaatagagccagaggtagctaggtctaaagtagatcctagagcatccataatttcactagtgttaaaacctgcacgagctaagttttcttgtgcgcccgctgcttcagttgcactataacgagtcgtttgtcccatttcacgggcggaattctccaaagcttccatttcagaagcagaagcattagtaaccgcccccactgtggacatttgttcttcgaaggaagcccctaaggcaacactggccccaattgctccagctactggcaccgtaaccccagcggttaaggctttcccaacgccggaaacagcattaccaatactggttaaactgtttgcttcattctttaggccttttatggcattagaagcgcccttcatggctcggttaaagggacctgtttcagcccttaatgttgcttggacatcgaaatttttcccaaaagccattggttacccccttcctttcgcgtttaatttcatattcaagtccgccaagctttccgtttgttttggttcggttggttctggcgggtcaaagacctgttcaaagtctttggtataatcgtaaaagtcttcaaactttttgaaagccggccggacatttttgccttttcctttggtcgcttgcacggcttgattttgccacgcgaggaaggaagcacgatagcgccattcttgcatcttcaagctataactaagcgcgtatacgtcaaactcctttagcgttgtacgtccagcttccacaggagagagatcatgccgggccatcaagatggccttcagttcttttatactccgttggggttgttcgcttgattgagccgtttctgtgctttttcggcccgtctcaaggttgaactctttcccatttcatcaaggacatcatcgtaaaactgaaagaactcatcatcagttagattgttaaagtgcgtttcaatctcacgacggtttaactttttagggccggtggtggtgccggctaccaacacatcagccaaagcagattgactgtactggttcattttggcttctaaaatcggaagcccaccagtgccaattttgaattcttggccttccgcttccatggtcggcgagtgtttgcgttcaatttcatctaggaagtctaagccaaagtataaatcgtaatctttattattgacggtgaccttcatcttgtcctcctatgctttattgccctggaatagtcggggtatccatttcgtcgttattgcctgggatggtgggttgatcgtcgtcttcatcctcggaattgtcggcgtcttccccaacaacggaacggtattcttggtcgccgttaacgagttgtagttgttcttgggtcaagctttcgacaccttcaattgggttgccatcaatggtgaatgagtaagacaattcaacctgtccttctgcgtccgctgatagttcaaaagagttcaagtaaccggtggcatattcggcccgttggtatcgtccaacgttgtacacaatccaggcttccatatactcttggtttcgacggtagcgtttgagttggtgccagccttcggttgtttctttgtcggaaatgtacgcaagcgagttaaactcaatcgtgctttcgccgtcggaaaccgtattaaaaataccgtccgtggtggcggtcccttcgacttcggtttcttcggataaggtcacttcggattggaaccgaatacgggttccatcttcttcgtcacggtttttgtaaggtcttaaaaagactaagacatttttaccagaaattaattgatccatctttattctcctttactctcaatagcacgaaaacgaaccgctagcacgtgatgcaatagcggttcccctgttgtgttgtccggtatggttgagtgtgcacggtcaagcgggttcaaggaatacgcaaacgctcgacgtggacgtcccaattcagcccgcaaggcttccagccagtcatctaattggttacgatcggtgcgcttgccccagaggtggacggtttgttcaacgtcttccacgcgatcggtgttgctgacttgttcggtgtcgtcttcgccaatgtaaataaacggataatgggcgttagcatctggcaagtagtcataaacgttgtccgttacgttttgtgctgtcgcaaaaatataacgaaaaacagcattagcaggtgtcatgcaaacgctcctctcacgacatccattaagtctttgagtagcatgggttgcaactcattcatcatgggtcgcataaacggctgagcagacataaagcgggtcccgaattcttgatacaatttgttatcgtaaaggctttttatcccttacttcttactgtccccagtaagttcggcatacattttcaattctttagaattgtcaaccactcgtgggagtgctttattctatgcaatttgtgcaaacaaaaagcataggttcaactcctatgctctacggtgctgatagctttttaattctatcagttaccacggtattttcttattttttgcatgctttagatataagatttttaccgtttttggtcgattttgttccggctatcaagcacaaccggaataccccgcccgcgcgtgaatgacgacttcatgaggcttgtattcggttcgaatattctcctttaaaaagccggtatcgacaggggctttttgtttggcaatggccatgcctttttcggcgttattgcgtaccacttgattagcttgcttcgctgtttgcccgccagctcggttaaggacatctatcaattcatcagcgccttggagatccatttcaatcttcatggcgaaacctccttcaagcggacggaccctttcacgggtgcgtcaatggcttcaaccggcttaaaactccgaccgtcgtaaaaggctttggagaaaggcggttgggcttgcaaaaagcgagccactaaaatacgatcttgacgattgccgtattgctcatacacgacttcttgcgtgacgtaattggctaagcagggtacgtggcgggtatcgggtttcggctcgtcatactcgcccgttaccggattaaattcagctggctgatcctcacctaagaccagttcaatcatgttcggtgttttaataaaagaccacccgcccttgtcgttcttgaccggacggttcttcatttaacttgaagtcacgttccagaataggccaaaactcatcatacaggcccgctacatatttcacgctatagccgtccacattctcgctttccatgccttcggaccctcttcggttgtagagttgagcagcgacttgtaccaccataaagttatatttttcgtcgatggtatttgtccctgtgatgactttaaaagcgctctgcgcgtcttctaagacgtcttccagaacctctaattctggtgagtcatcggaaatctctaaacgacgttggagtttttgaagcattagccttcactcctttgagccaagtcaatcaaatcagctttgcgggcatttgctggatagtccacgccgcgattatctaaaatttcttttagttgcggaacggtgttgcctcggtagtctaacggggcttcagggttccccgacgctactcccccgcttcaccttgggttaaagggttattgtcttcgtcgtcatctctgcccaaggacgcttgaggttgaagaaccgcaaagtctttcgcaccttctggaatagccacggcaatttcaaagacggctcttagggcttgcaagtcttgttcaaagaggtgaacatcgcctaagctttcattatcagcgttttgaacagttgatagagtcgcttggtctgcaattttgaggcgtaagctagcactgtttggcacgccgtatttcaagccattaaagttaccagtgagaagggttccatctgggtaatcttcaccatcagataattggagtgcgtggtaaggcaagctatccaagacaccaatcccattctggctagttgggcgttcaaaaataaatcggccgttgacattgtcagcgtctgtgatcgttctaagatcccggttcagggtgcggtgaccaacaaaagcagttggttcgtttggagtggtggcgcctaagtcaaagatgttttcagcagtcaagtcaccagctacaatattgccggaagcctgtgcttgggctaaaacagaattgccaaaggggttgttgtggaggcctaagaatgctgcgccatcaattttcttattgaacttgtcggcaatgaccggcacaatttggctaaagtattggctccaggtgtaatttagaaactcttccgagacgggaaggataaccccaattttcttggtttctaaaatgtagtcactgccttcaacttttgcggttgagattttttcgccttcgtcgacaaagtaagcatcagataattctccaacgccaccattacgacggacaattcgctgattgcccatgtccacgcgttcacctagttgaatcagcttagaagtgctaaccaattgatttaaaaacgcgttggtaaatggttgagcggaaacttcacgtcctaaagtgtcggacaatagaacgttatcgggtttaaatgtttgagccatatattatctctccttcgcttggtctaaaatatcaaacatattttgatcgctgtcatcagtttcagttccgccgctcactttgggcggtttgctagtagcgtactcgcttttcacggcactgatcaccttcgctaatgcatcagcccggctactcatgccgtctaagctatctgcttgcactaaatcaagcgtggactggttgacgggaatgttgagttcatccaacttgttaatggactcatcatgaatttcccgttgtttttcccgccgctgatattctgcgatttggtcttcgtatttctgtcgttcttcttcttgcttgcgctcggtttctttaatacgatagtcggcgaattcatcggcggacatcttcgcttctttttgggcttgctcgtacgctttcttaacagcttcttcctggttttctttgagttcgtcgatttgcttttggtatttatcttgttctttttccaaacggcgtttcatttccgccacttgaacagtcttttcttcttccgcttggttttggtcttgggtttgttcttcgtctgccatgtttaaaatccttccttacgcttttacgtgcaacctccacgatctcatgcacctttttacgtcataagcacggtttggacggatgcctttaaggctcatagtctttatactcatctaaatttgtcccgccatccacatagtccattttcgtttgcatataactgctacatttgcagttcggatgcatgggataaaagttttccccaacgcggatatcgtctagcggaatagcggtgccatctaagtccgcacaaacgtcgcaagccgttggttccgccacgtaaatggcatgggtgaacccattggccttgccgctttcaatttgggagtctgcccgtacgcgggccatttccgtcttgagcagtcgcatggcttcgttctcgctcgtatgaaatttggccatcagacgatcgcgctcttgccggtaacccatcatgtccgtaaagatattgcctagactcttgaatacatcgcgttgcatttcttggtaatgaccggttcgcccccaaatacgctcgctgaagtctgcaccgtaaaagtcagccttgacaatattccggtaatcctggctcgggctaaccacggaattgccaagaatgcccgcttgctctttgttttcgcggattatttcccgttggcgctccatttcatcttccacttcgtccagcaaggattgctcaattaacccttcttcttcgtcatacattgtcaataattccaaattgatttcagcttttaagacttctaagcgtgacgttcgcattttcaaattataggtgcgcaaccattcgttagcttccgggctaaagtctttttcagccacggctttacgcgctttgtcaaagtactgtgtaacgtcaaaatcgcttgcttttttcttcgcttcttccacgctcagcccttcacgccctgcatagcgacggtaaaactcatcgatcatattgcccacgcgttcagcagctgcttggtggatgcctttcatcaattgctcttggtcaacgtcttccatgatccattctgctatcttgcgccgttcgcggttataattccggttcgctatctgttgctggcgggtcttggtcaaaaccatttcggcgttcctcctcactcatgtaaagctgagcgggactctcgcgggtcaagcgttccacttcggtggcttcgtcggtgaaggatgccaattctcttaaagtagcctgactcaattcaccgcccgcttcgataaagttgccgacttcttcccaaatgtcttgcggaaggttcgggtgaaatgtgaatttcaattgctctaagttaattggtgtgtcgtttaactcttcatggatattagcaagcaatttgtagcgacggcgcaaagccttggtgaagtagcgttctttaatcacttgaatttgacgtaagccaatcagcttgtactggatcgcaatacctgattgctgtccgctaaagtttttgtcgtccaagttcgggatattagcaagcttgaaaatatcgttcaacaagcggtctttgtatttttcggtcccttgtacgtcatactgcttgtaaatatattccgctttgccttgcgtggaagagccattagccgtaacgccattctcgaggacaaaaatattagcgtccgccatggcttcggccccttcacgcccgccaatactatcaatatcatccacggaaagcactaaagttgcatcgttcaagtcggacatgtagttagctgtgtctgattgcgcattgtcataggcgttgatttggctcaagaccggttcaaagtccccagtacggaaacggttattccaccactcgacaacaggaacaagcccgtattcatggcgggtcacgtcaggactgttaaagttgatgttttcgtaagcttggggcgggtaagtataaatatagtcgtctgtgtaaatagtgatgtgcattttcccgttgtaagtcgggcaatgcaccgccccaataattggatattgaacgctcgcttcccggatcacaaataattcgctcgggtcaataattgaaatattatctcgtccgtcacggtcacggtagtgcaattcataagcccggccaaagcgggaggcatcatagcccaagtcataattgagagcattaatatcgttgttttcgtggatgtcagaaaggttttcctcgtctaaggtaatcgggttccctagaagataacccgttacaaaggaactaatatacccgccaaagttgtgctgaatacggttgtcagccttattcttgtccacgcgacgctggcctgtcttgatgtcggtattattgcctttagaataatcatctaaaatcttgatacggtctagctgtgcgcctctaaattggctcagcattcggcgcaatcgcttgtggccttccactgtattgagtaggtcgtccatattatcagctagaaagtggtcgttggcgccgtcttgaaacgccacgctgtcatgtcggttcatcacggtgtcccggtccatgtcccgttcaaattgataggactttggtacatagtcgccttcgctcattctgtcgctcctttctatcggaagagttgtttggctttatgaatggccttgtcagcattaaattcccctttattgagcatgtcctgccctaacgcgtatcttgttgcatcgatagcgtggttatctttatccaccagtcttggtaatggatcgccatagcggtccgtgtcgtaatcgatgttttcaaattcccacgcgatgtttggcgttcgtttcggatcaatacaaataaaatccaaatcatcaagccattgttcaccatactctactgagtctttacctttcacggcgccataaacgcgcttaatgccatgctctttctttagttcggcaatgctcttcggttcggcactgtcggccgcaattcgctcgctttgatagcctctcgcatgcaagacctttgccaactgacggtttgaaatcttttgcccataatattcatcaatagcataaatgccattatgcttcttgtcatagtgccagcagacaaaggctagtggatcggtggcgtatccaaagtccaccccgaaccgcaagttatcgaaaacttgcgcttgctcgtccggaatggtgtcaaacaccaaattgtcaaatggaacaacgccagacccaatggcttcacccaaatattcccaatcgtaccggcgttggctcttttctttcgttgcttcggcttcgtcaataaaagcttgggcaatgtagggattgtcgtgataagtcgaatgatgcacataagtattcaacggtaagaagtgactgttgtactttttattgacccaagattgtcggcgtttgggcgggttataagagtagaagaacttataaaaaagaccgtcccctaactcgccccgtaagagggagttggtgatggtcttgacttcatcttccgttttaaactcggctaattcctcgatccagccaatggcaaagggaaattgactgtcttttaaagacttaatgcgttccggattttgtgcgccacgaaagacgatataattcccacgcggtaaataagtgattcgcaacggacttttgttgaatttgaacaggtgtgtaaccttttgctcctggatggcccatttcaattgctcataaaccgactgctccagggtattatcagtcttccgaatcgccacggcgttgacggcctttcgcataatgagctgaatcaggatatgtgcaatatcggatgatttgcccgaccctcggccacctttgcaaacgatgtttaaaatgtcaggatctttcgcggcgttccatacggcgtgaaatttgggcggaatcagatcactcatcttcaggatcgatgtcatcgataaattgcacgccccctgttaattcaatttcggaacggtcggtaaaggctccatgaattttcaaaatatgttccagggaacgctggcggtcttccacggacggtgtgtattggcgttccgtttccttggtaacctcgtctttccgcttatcggtttccttgaagtggctggtctgtggttcgcctctagcaatgctagacgatagcgcaatcgcttctgcgaccgacatggctttttcatcgaacagttgttcggttcggcgtttgattgcttgtgatattttaacattatgcaacaaacgtcctgcttgcgctccagctgttttctcgctgtagcctgcgttaatggctgcttttgtagcgttcccatggatgatgtactcatccacaaattttcgttgtcgcacatttaatttatcgattttccatcacctcctaaaatatgtagaaagaatgcaagctaggcggaggaacgtttagagaatagcaatgatacgttaaaaagagtaggacactttggtatgcaccgtgtcaaaagttgatcggactttttaaaagtatgaacacctttcttgcattctttctatactactactttacacctgatagaggtgtcttaaaaggtcctcatgaatttgtgcgggaatagtttttcaaaagctcgcaaggcctgctcgtgtagcttccgcacccaccggacgctataatggtgctgttgggcaatacgctcaaaggttttgcctttaaaatagcgttcagataataccatacggtaacggtcatccgacaattcattcacttccatggatagttttaatttatagtcaactaactcatcaacctgcttatccacatcgtcatgaagtttaaagagtcggtgcaacttatcttcgtgcgtacgagtcggggatgactgaacattcacatcactaatcttactggctgataaaatgctcgccttgaccaattcgtattgattttgcttttcagttacggcgtgatcgagcgttaggcattgctgaaagtactcccttggcgtcattcactcacctcttccaacttgtccatatagcggttataggtctgccgcttaacccgtccgccatactccatatgccgaatgacacggctccccatggataaatcagcttgcttcacgcctttccgcttccgcttttgttttatcgcttgggcctcttcgggcgtaataaacaagtattttgtatgcccttgttggatttcatcatcaatcatttcttcaatgatcggtagatcgttgacatcaacgtcatctctaaagagcgtcaaggcctctctcgcccgtcgctcactcatctgaaggtatttcgccacgggggccaagttgggcccataatcgttaattttatctcgtatagtggccaagtcttgaggagaagcaggggccttcactgaagcgttaaagtagtcttgaacctgctggaggcgctgatcatcatcggggcaatcgctaacatgaccatattcattttcgatcgatcgaataaggttaataatgcgttcttccacgctggacctcctttatacggtgttcgagacgacgtttaagtcttctttgatcgcttctaatcgttcatcgtcttccggcacgagcgatagctgcccaaattcatcttcgagttcagcgacaagggcataattgatcacgccaccagcccccactcgatccttttcgtctaaataactcgcaaggccccagttcggttctaacagcatgtcttccatttgtttcaaatgatgaggcggaaccgttttacgcccggaaacataactaccaaaatcagtttcagcaatgcccatataagccgccatttgtttttgtgatactccctcttctaaacttctgagcagtagctgacgcaacaccacaggcttatcaggtaaatggagccacggttcgactttttcaattggccaatccagtgccacggctacctggtaaaccgaatgagggcgtggcaccaccctatcttcttcccacttggtatacgtttggccaaatgtcccgagtacaccttgaattttataacgactcagtcctcgcttcaaccgttcttctttgagtaaagcaccaaaagttttagtcatcatgggtttcctccttcaccatattgctgcgtaatcgtttcagtgtttcaatggccttaccaatatcctgaacaggatcgtctttctcacgcttcatataccgctcagcaatgcaaaccatgaccgttttgtagtgctggaagggtaaggtttcataccaggcatcaaacaaatctagacggccttgtttgtagtggccgggcttgattggattgctagacttcattgccaagactcctcgcctattactcgatccacaagcacataagcactagggtctatatcgaacttttccttgaacaattggatagcctgcactcggctttcagactgaatcacatccccataataatttccatattgatcaatataacaaaggcgataaacattctccttcatgctcaatcctcctcaataatttgaaaagcttcatccacgctgtgtgccaccccgtataagatcggttgcgttcgggcaaaatcccgaaattgcttttgctcagatcgtaaacgaccggactcatttttgacctcaatcgcaataaattttccgtcgcctttccggtagccaaccgtatcggggaaacccttcggaaagagcttcacccattggccaaaattggttttaattttcccggcattgctgcgccataagcggtggcccgcttgattaacggccagcaaaatatcattttgcacttttgcttcagatgccattagcgcaaccccttttcgatcaaaaagatagcggcttgattgtaggactggatattgtttcgcttacggtacttttcaatctgatcatttaaaggcgctggtaagttgagtgatgtttgcttcacaccaaagcggttatgagttcgtctattttgcttcaagtatgatttccacaagggagctagagcattggcctggtcagccgtgtaacgagggctctccgtcatatagtgactgatatcgtcgaattcattggtacggggaaggtcagggtcttctttcaatttattggctagattgtctaaattcgtattggaagttaaacggtcatctaaataatcttgaaataacatctcaaaatcctttcttttaaattttacgagtagagaagtccacgcggggggtaaggcttatttgttctacatgattgctcgcccacaaaaatgacgacctcctgaagaccccttataaccctctaaaccctatcaacaaagcatctttatgcctgttttccacatcatgaatacctcttaaaatctctatctcttttatacctttttatatttattattctttttctttattacttctataaaagaaggtcttcaggaataaatattaatagtaataaagtactgtcatgacagcattaaacaaacgttatttaacttaataaggtcttcagtttagccctcaggccttcagtaatgaaggtcatgaaggccgggatatttttctttaatgacaagtcctttataaaaattacccttttcattatgtgttcgactaaacttctctttcattttcttgccaaacgtattcttattcatcttgtactcaccactgtcgtcagcccaacgtttgtagacttcatacagtcggccagcaggagcgaggccatcatccaaacgttggcattcatcggcaataaagtgttctaagacgtccatatcttgccggtagtcctgacttgcgtggacaattttgtgcggtgctgttagcccctcttcttgccattgaatggttccttcgactaaccattcaaggatagcgggcgcttctcttagaagcttgtatttaaggtctttgtcaactttatcttttgggatctgcacatcaaatgggatgaggatcagccggcgccagatcccgtcatccgtcccgcgaacaatcggcttatggttggtggacacccacaatttaaatttgggagtatattcaaaatcttctccatataagaaccgcgcggtgactttatcgccaccggttaactgtttaatcagtccttcatcaaagcgaaagccttcgttaggctcgctagaggtcaccattctggaaccttgtaaagcagcaatgtcgttgtttacgccttgattacgcttgaccattaagctatcagctcgaacggttttggcataattgcctaagatttccgaaacggtttcgataaagagtgatttcccgttattcccttttccgtggagaatgaacatgacttgttcacgggtactccccgtcaaggaataccctaaggctttctggatataatcgatggtggcttggtcgccgtcgaatacatcatttagaaagtcaagccaggtatcgggagtatctttctcggtataatcgaattgcgtcactttggaaaagcctttggcactgtcgtgatcgtgtagtgtaccattcgataaatcaatatagccattttgaacgttgagagccatgttgtcttggtcaaaagcatccgtggacacgggaacccggtgccgaatttccttcattacattatctttatggttggtgctacgactggttttaatgaacttccggaacgctttctgcgcttcttcttcatccatgtcttctgggacttcaatggtttcattttttaagtcgtcaatcatagcgtctactagctgtcggacttcgcccatgtcgtcaactttccagcgtgtgccatcgtacacataaaagcaattgtggacgaatgaataacgaacaatgtccccgtaacgatccatgaaacggtcagcgttgccggtgtcgtcccatgaacgggctgggtaatctttatcgtttgattggtcaaaggtaaaatgatatttgagcggttcgcgtttgtgcttatccggctcataaacgttctgcgtgtcgttaatagcccggtgaagggtagcactcccgtacgtggttttcccccgcttcgcgtcccattttgaccggtataagctagactgacgaaagatactgtccatcttctcataatccttggcgcaccagaacgccaaaatgttggccaaggcgatgtcagcttctgattgagaaggataatcatcctgccaatggtcattcatgaatttcttgaacaaatcaccttgcttactggctaaaatacggttgataatctcccgctcagacaagtcgtgtaccgtggatttgcggaacttgtgatgaacaatcttgttttggtttggttgaatataatgttcatacaaacgatgaaaggccgcttggttgggctgattgattgtttgatagcgtcctaaactgtccccggtcatggtgaaaaaacggccgctgtcgtacatttccacattgcctttccgcttggtgtcccctgggacttgaccctttaaaataatgtggatcccttgaccagatggactaatctcgccatagctttccaagctgtggtaaaatttcgatactatattgtcggtgtggtcgccgtttttaaaacgctccaagtcggtagcaatatcatctaggtcaatgcccatgtaaggcggttgaaagaaaaaacctaagccgtcagcatctgtttcttgaaaagccgcacgggcggtttgaaagtccgcccatgtgcttgtatcattgctcttcgcgttttggtaagtgttggggtcgtacggtattttggtttgcttcccgttccgtttctcatacttccaaacgcaccattgcttcaattctttcagttcttgcggtatcattgccaactcgttcctccttaaaatggaatgtcgtcttcgttaatggtaatctcgtcgtcatcatcagctggtgaactcgctggcgttccatctttccaggtgtgattaacgatggggtaatgacttttcccataattccacggcgccacttcattcacgtcttcttcgcggtagtcggaatattctttcttgacgtaaacacgaaccggcttgccagtgatagcttgggcgaaatcatccattgagtttatttcggttccttctggtacttcagtcgccattaaaatatattgaaagtcatcaacggggtattggcctgcgtttggcccattttttcgtttccaattgtcgttaaagatgtggcggttttggtagcctttattctcttcaatatcgtttcgaaccacaaggtcaatctggaaggtttccgcaccgtttggggtagcattttcacctgcttttttaatgatcatttcgtattcgccggtgggtaaaggttcgaaatctttattgccattgttgagatttgagtagtctgctttaaataacatctaaaaaactcctttgtatttttctttataagggtgtatggtttggtaaaattgaggccatgataatggttgaagaggttgataatggtacttaagccaaccatctttatagcctcgggacttggcataacaataccaatcttctaaattgtctaaatcggactgcttacgttttagataatctcgctgcaatcggactttgcggtaatccgccttaaaagttggttgatcgacttctactaagtcagcatccacctgctctaaatcatcatgaccgctgttagcttgaatgctttgcccgcacatcggacaaatggttttcccacttggaataaccgcaaagcagtgtgggcattccgtcacgctggggacatcatcccggggcttgaccttcgcttgtttcttgcgaccgtgtagtgtccagtctcgttcagtgttgggaaggccgtgcaactcataattgccaacgtggtcaataatggtggctgttttcccgggcttatagcgcatgctacgcatggattgctggatgtgaagcacaaggcttgcggttgggcgaactaagatgacacattggcaatcgggaacgtcaaagccttcgctgatcaagtcgacattacataatattttgagattaccttgcttgaagtcgtccataattttggctcgctcttgcttcggtgtgtggctgtctgcgtgaacggcttgaacaccttctgcttggaacgtcttagcgagttgccggctcgcttgaactgaatgggcgtataaaatggcttgctgaccgctggctaacttctggtagtgctgaacgacatccccaaaaacggccttcttcatcgcttgatcaatcgaacgcttggaaaaatcccctgtggatgacctttttagcttgcttaagtccgctaatttcggggcaaaatagcgatagggggctaaaaattgatgatcaatgagccattgaacactagggccttccaccatctccccatagagatcgtcaaacccacgtccatttaagcgccacggacttgctgtaaagcccaagcggtaagcctgatcaaaataagtgtaaatgtcttgatagcttttagcccggctgtggtgcgtttcgtccgtgataatcaaagacggctcgggcaattcagctaaccggttcgcggctttgcgaacggtcataatcgtgacataggccatgtccacatggttttgttgaaagctggcttcaatttggtcggccaattctttgcgatgaacgatgaataaaatgggtcgttggttctgtgtcgtcaggcgagcaatttcagcgatgacgactgatttcccgcttccggctggactcaccactaaaacaccttggtggcgtgtcagagcctttctcgttcgtttaacaagctcttcttggtagtcataaagcttatacaacgagttcacttaccttagctcctgtgcggtcgtctaagcggtttttagcaatgacttcaggagtcggctggagtaggaagccacgaacttgctcattgtcgcgctgcacaataatcagtctagcgatgacgtcacaaagccccataaaattttcagcaatcgagttccgtaaatccggaaaagcacggttaaaggtttgcccgctttcatgctcgtacttatcggttttctcccaagcggttaagataaggcgaacatctaaggtctgtaagcctcttaacgctcgcatgatcataaaatcgacaatctggtaatcggacatagccggtacccctttttggcttgccttgccccttttcccaagattttcaagggaggatcggaacagttcgctgatattgtcgatcacgatattatcgtatttttcttggtagcttttatcggtaattaattctttcgcaatattattccactcttcccaaatattgctggtatcgatagaggccacgtcaatagcttcttctcctttgagaactcgactggacttatcaatatcaatcactaaggttttgcccggcaagtatttcaaggaacttgttttaccaacgccttgaccaccataaataagataggtcgcattctcttccgttaaatcagtagcgcttttaatctccatcttgttccctccttatcgtatgcttaagctttcgccttgtttgagttccacgccgtctaagccgtattctttaacgtattcttttagcttttgcttatcgagtttcggtttttgctcaatgtagaattcagccgggatagcttcctcactgtggatatctaaagcaggcgggttcttgcgaatggaaatattgaagagatcagatttgattttgtctttttgggttgctttcatattgtcataaatataatttttcaagctttgggctttattctctagtgtcttttgccgtttccccaatcgttgcttctcttctttcacggctttagcatccgcttcaaacgattgaatcattttcacggtgttaatcgctttgttttcaaagctatcattgacttcatctaaagcggcggcaatatcctcatcctccatatcttccaaaatattttgaagttgcacatagctgccactcaattcatataaattcattccctagactcctcctatttgtgttaaactggtagtgtgtctttttgtaagaggactgtttttacagttctctttttttgtagtcggcgtacttacgtcgtcttttttcgttctgctgtatttcatgaccaatcaaccagaagagaaagaccaacaacggaactgcaaattcacctccaggggcgtaattgggccggtgcggtagttcgaaaatgtaccacatcaatgtgacattcagcgtggccaaggcaacaatgattttctctttcatttcaagacctcctgttctcttaatatgcgttctaccaaaaatttatatccttcttgactaataccataatcaaacaaagtgggtgttttaaaaatatgaacgtaaatttcagtagtgccatcatcgcaagtgttttctaggatactgataggtaatatatttgctctgctaacaatagattctaaagatgaggaacgcttaatgtttaattcgattgttgttcttgacaaaaatcttattctttctagcaagttctctaaaaattcttgatcaacaaagtcgccaaacgtttcccctcgtataaagttagcaataaattcaagcttaatagcatcaattgtgccggttggtgattttacagtagaatagagatgactaaaaatatctttgagatagcccattgttcctattgaataaactaaatctaagtcggtttcatttaatttcctttcagtattaactttaatgttgtttataatgatgttcacctatttccctttcttaggcaaaatcctgccatcgatataacgtttttacttcatcctctaaaatcttcagcatttgcaccatgagtttgtctttttcattttcggttaaagcatagtcctcaaagacagtttcccttgctttttcaagtggtatagagtgagtaatcatcatttcatagtccatgaagcagtgctttaacatcgcttgtcggtctgcttgactgatttacatcacctcctctaaatggtcttccaaccattggctcatctgcttagccccaaacttccagcgatccccctttccacgtgggtatttgacgaatgtttctaagtcagaacggtaggggtaaagaatatactctttgagccaatcagcacttcgccgcgtggcttggcttaagtctttcatttcccaaaccttcccggtgaggtcattgttttttaactcctcaagttccgcccgtttaatgagtacgtgatcttcaggtacttgaacctggatatctaaggtttgcatggggtcacctcctttaaataatatttacggttaaaccgtaactttaggtaaaaaaataatatcgtcgtaactgacattaaaagctttttctattgcttgaatttccggaacgtctggaaaagatttagcatgttcccaattgcgccacttatactcactaacgcctacaagttgagctgcttcagcttgagataaatccttcaatccacgcaaagcttttaaattgtatttcatttttttgctcctttcttttagcttgatttaagtatattacggtttaaacgtaatgtcaaggataaaccgtaattaaatatagtttcactttaatttattacggtttttcttgatttttgttttattctatgcaataataaatttaaagaagaaaggaggtagcaagctgatgagtcaacttgggaataaagaagtgatggctgaaaatattaaatctttaatgaaacagaatggtatagaccgaaagcaattgagtgacgatttacaaataagttatacgactatatctgactggattaatgcgaaaacgtatccccgaattgataaaattgagctgctagcgaattactttagagtaaataaatcagatttagttgaaagtcagaagtgcccgactgaaacgccggctttggttccaatattgggaaaagtcgcagcgggcaagccagagtatgctcaagaagatattgaagggtacatgactttgccccctggtaaagtatcgaataagggccttatgtatttaaaagtgaaatctgactcaatggacaaaatgttccccgtgggttcgtatgttcttgttgatacagaagctaccattgataatggcaatgtggctgttgtgaaaattaatggtaatgaagccactttaaaaaaagtaaaattcaataatgataaagaggaaattatactcatcccagaatcaacaaatgacatacatactcctgctttttaccaagcaaatgaaacagacgtatttttgataggtaaagttatcgggatgtacatggatttataacattcgagttttgataaaattgcttcagcagtttcgtataattcaattatatgaaaccataattgatgatcgggaaggaggcgtaaagaatggaaataggaaaacggatgaagagcagaagaaaagaattgaaattaacagccgatcagattgctaaagcaattggtgtttctcgatctaatgtatatagatatgaaaacggggatattgaaaatttacctttagagatactaaaacctttgagcagtattttaaaaaccacccctcaatatttaatgggatgggatgataatatttcagctgatttcgccactatctacaatcaactcgaaccaccaagacaagagaaagtatataattatgcaaacaaccaactgatagaacaaaaccaagtgcaggaagcaacaacggtttatgtaacgtctaaattatcagcaggccctggcgtaatagatttagatcctcgaaacgtggaagaagtacaatatgacggttatgtaccacaccatgatttagctttccaagtagccggcgactcaatggagcctctgtttgaagatggggagattgtctttgtcgaaaggacagaagatatttatagtggccaagtcatagctgttcaaattaatgaagagtcttttatcaaaaaagcttacatagaaaatgaccaactaaggttagtatcgttaaactctatgtatgaggatattttggctgatggaactgataatatccgtgtcgttggacgagttattttataataggaggagttatcaatgcagacgttcaaaaaaatagttatctactttttgctatggtcttttgggatccttactttcccggttcttctcttcttgaattggaaaaataaagacaaaagctacaagaactaccttgtcgcttccgggatcgggtttgggatgtttttaatcgttctgcccttcacagacgaatcagatacagcttccacacaagaggtggctcaagaagaagaacaagctgagggagacgatgaagaggaggacgaagcggaagatactgaagaggaaaaagacgaagaaaacgaagaaccagaagaggaacaggggctagaagataaagtcaaagctgtagcggatgatgtcctagatgatcgagccacagaagccagatatgtggaagatacaggatttattagcattgaattccaaatacgcgattcttttacgaataatcaaagaaaatttgggtttttaagtgatgcccatgattacactgaacaaattcaaaatgaagattttgaccgcatccttttttctggcttttttgatacccgtgatcaatatggcaatgttgaaaacactaaggtcgctacccttgatatgaataaagagacagtggataaaatcaattttgataatattattcctgacgatatggaaaacatagcggatgaaatctattttcatcctgctctactcgattaagcataataaaaaaccgcacgctggcttctggggagaatggaacgtgcggttttataaggagtaattataggggtacaatgtaaaaatggtggttccccaattccttattttagcatttatgcactcgttatgctagaaaagtaaggagtttttaaaatggcttttttgaagaaagtaaaatcgggttggaaatatcgcatttcctacaaagatccaatgacgcaagaactgaagcaaaaatcaaagagtggctttgccactaaaaaagaggcccaacttcacgcttcaaaaacgaaagagaagttggagcagggattgaacttcagcaagaatatttcttttattgattactttgaggagtggtacaaaacctacaaaaaagataaattttcacccagctataacaaggacgtggaaacagctattgagcaagcccgggattatttcgggcaaacgaaattaaaaaatataacgaaacacgtctatcagaaatttcttaacgactttgggcaaggccgcgccacttccacggtgaaaaagaaacatgtttttattggggagtgtttgaccgacgcctttcatgaaggcctgattcccaaagacccaacttataaagtaacgattacgggaacgaaagatcgttacgaagaagcggacatgtatctcaattacaatgaagcaattaaattgtccgagcaattgaaacaaaacctgaaaccaacttatacctcaagatacatgatcttgctagcgctagcgactggtttgcggtttagtgaaattgttggattggcttgggatgacattgattttgagcaacatacgctatcggtcaatcgtatgttcgattaccggacaagtcaacaatttcagaaaccgaagtccgaaaagtccaagcgaaccattgcgctggataaagcaaccgtagcatggcttaagcggtataaattgcaagtgcagaaggattaccctgaatacatctttatggacaaattcggccaacacgtgtccaatagtggcgtgaataaggcattaaaaaaagcctgctcaaaggcaggcgtgaaagagatcaccttccacaaattacggcatacacactgctccattttgctgtacaaaggcattaacatcaagtacatctcgaaaagattgggccactcatctacccaaattacttatgaggtgtacggtcatatcctagatgagttggatcagcaagaagcgcagcgtgtggatgatatcatggcagaaattacatctgctggagtgcataatttttatgcattgttatgcattctgtcgttttccattttcaggaatgccgtcatatcagtgtttatggcttctattgttttctgaaaacgcaccgtataggattcgaacccataaccctctgatccgaagtcagatgctctatccagttgagccaacggtgcaagatgaataaaatgagccatgctggattcgaaccagcgaccctttgattaaaagtcaaatgctctgccggctgagctaatggcccctcttgagtggaggttacaggacttgaacctatgaccctctgcttgtaaggcagatgctctcccaactgagctaaacctccatgatcgcctagcaaggtccggctttcacacagggaaaccctgcattatcctcggcgctcagaagcttaacgactgtgttcggcatggggacaggtggatccttctggctattctcactagacatcatgtttaattaacaacttctttagtttactatcaatccagtaacaagtcaagtcattttggaaaattaattgtttggcttctttcctacctcagaacttggctagctcgtgaatgcaaaataatttattttgcacagactaaaatattcattaactagagctaaatttgtatcttgaaaaatccccctattacgctataatttaaactataatcgcctttttacatagaaggtaaatttagagagatgaggaattttaatggaaattaaccagcaatttttagacaagtctagacaggcctttgccaatgaccgtgctttccggattgcccaaagagccgctaccaacactggtttgttggagtctagcattaaccgcagtgaagacgatagtaaccgccacaccttcaatattgacctaaccgaaaccgaaatccggtcccaaaaccagtcaggacgttgctggatcttcgcagctatgaacgtcatggaatacaaggttgcccaaaagttcaacctcaaggaatttgaaatttcccaatcctacatttacttttatgacaagttggaaagatgtaactacttctttgagtctatcctaaataccctggacgaagacttggacagccgactccttgcccacctcttaaccgatccaatgggagatgggggtcagtgggacatggtcaagaacatcatcaataaatacggtattgtccctaaagctgccatgccggaatccaaaaactcttcaagctctggccagatgaataactacttgactaaaatcttacggatggatgctaaaaacttgcgccaagctcacgctgaaggcaagtcgattgaagacttgcgcgacttagtccaagcctacatggtggatatctacaacgccctatctatttctttgggaactcctcctgaaaaagtggactttgaaacccgggacaaggacaacagttcatctcctacaagaacattactcctaaagaattcttcgacctcctggacatggacttggacgactatgtttccattatcaatgccccaaccaaagacaagccttactacaagtcttacacagttgaatacctgggtaatgtggtagaaggtgagatagtccgctatgtcaacctaccgattgatgagatgaaaaaagccatcttgaaacaactgcaagatgatgagcccgtttggtttggctgttttgttggccagttcttcaaccggtctggctcccgcctatacctgactactgccaatgtcttggacctcttcaatgttgattacgactttgacaaggaagaccggcttgactaccacgaatccctcatgacccacgccatggtctttatgggagctgactatgacgaaaccaacaacaaaattaaccgctacaaggtcgaaaacacctggggtaaaaactccggccacaagggttacttggtgatgagtgacgaatggttcgaccagtacatgtaccaagcccttatccacaaaaagcacctgccacaagaagttattgatgcctaccaagaagagcccatcaagttgaaaccatgggatccaatggggtcactagcttaaaagactgataatagatagagccaggagcaagttcgctcctggctcttttttagattaagtatgctagccactgcctcaatctaggaatttttaggctggcttctctaaacgacggctcaaagggtagcctaggaccaggccaatcgctgtctgaaaggcatctggtattaaaccagctataccagtagccatagttccatacaggataatattactgataaagtagcccactaccataaagacggaggaggcgattaaaagccctacttggtccttagtggccctgcccctggctaatccaacaatatagccttgtagtccgtggacaagggctgagaaagggatccactgggcataaccggacaagaggtcaaccaaggctcctgacaaggccccaacagccaggcctggtcccggaccaaagaggaggcccataacgacaattcccgcatcgatcaaggaaacgaagccattagaccctggcacagggatcaaaataagcagggaaagagccacaatcaaagccgttgccaccgcataaaggggtagcctacgcttcatgaaaacacttcctttctttacccctagtatagtcctcaaatagttaagtggcaagaagtccacttggctagctaaagggacaagcttacaagactaggtaaatattgactatttatttcaatgggtctaaactataatttaggttaaccaaataaaaggaggagaaatatgaaactagtttttatccgccatggccaaagtcaactcaaccgggccaatgttttcacaggttggttggaccccaaattgtctgaccaaggagtagaagaggcccagcaagctggcttgagcttgaaagaaacagggatccactttgaccgagtccatacttcagtcttaacccgggctcttgagaccagttattatgtcttagaccaactggaccagctctacctgcccatccagaaaagttggcggttaaatgaacgtcactatggtgccctccaaggcttaaacaaggcgaaaactgctgaaaaatacgggcaagatcaagtccacacctggcgccggagctatgccacccggccaccccaaggtcagggccaaggctcttttgaccgacgttacaaggatttggaccaagatttactaccagctggagaatcactcaaggataccttgaaacggaccctaccctactgggaagaccagatcgctcctgacttaaaggctggtaaaaatgtcatcgtcatcgcccacggcaacagtcttcggtctttaaccaagtacttggagaatatttccgatgaggctattgcccaacatgaaatcgcaacgggccagcccattatctacgacctagatgaccaattccacattaaaaacaagcaggtcttaagccaaaactagggtcgactgtaatcaatagctaaaaaaccaccccagcctactaattagacttggggtggtttttcagctgattagacaaggagaagatgggattcgaacccacgtgccggctagaccgacaacttgatttcgagtcaagcgcgttatggcctcttcgctacttctccgtgaatatcttccattttataaaaaataagtctaaatttcaatctccccaccaagaaggactgaccggtatcgagtcagaaagctctttttgacccaggagaaaagcaaaagaccccctcccaaactcagcaaatgagctaagtttgagcggagtctttttgctacctagttaattggtcttgcagtggagatggcttaacgctcaccgacgtattcaaagataccagcggcccccatacccccaccaatacacatggtaacgaggccgtatttactttctttgcgacgtttcatttcggagagcaacttagcagtgacgatagcaccggttgccccaagtgggtgaccaagagcgatggccccaccgttaacgttggtgacttctggattcatgtttaattcccgcatggaagcgacaatttgtgctgcgaaggcttcattaaactcaatcaagtccatgtcttccagtgttaggccagtttgtttcataactgcaggaactgcttcaaccggaccaatccccatgatttctggtgagacaccagctaccttgtagccaacgaatttggcaattggtttgacacccaattctttaaccttgtcgcctgacatcaagaccacaaaaccagcaccgtcagtaatgggtgacgattgaccaggagtaacagtaccgttacgacggaaggcagttggcaatttggctagggtttccatgctagtgccccgtctgaccaattcatcagtgtcgaaagtttcagtggtcatttcaacaccattggcagtatatttaggtttttgcacttggaccgggataatttcatcaaacaagtttgcatcttgagctgctgcagcccggcggtgagattcaaccgcaaaagcatcttggtcttcccgggaaatgttgtacttgtcagctacattctcagctgtgatccccataggaaccccagttttaggaccttcatcttgaagggttgggttgttggttggttcgttcccacccattggtagggaggacataaactcgaccccacccgcagcgacaatatcgttttgaccagcaataatcgagttagctgcagttgcaatggtttgcaagccagatgaacagaaccggttaacggtttgtccaggaactttttgggacaagcctgctcttaaggcaatagttcgggcaatgttagtgccttgaggtccttctggagtggaacaacccacaatcacatcatcaatggtatcagggtcaaaattaccttcaatacggtcaatggtgccctttaatacttgggctgcgatgtcatcaggtcttgagtagaaaagggctcctgacgctttccctttagcaacagcagaacggccgtaagcaacaatgtaagcttcttgcatcctcattcaaatcctttcatattcctaatctagttcattatggacaaaatcattagttccgcaatggtttgttggtttctagcatgtgtttaatccggtcgtaagttttgtcttctttgctgacagccacgaagttatccacctcaattttgaggagttggtcttcgttgactactgtttgaccagggatattaccaccagctagaacttcagcaatcttagttccaactaagacatcgtggtcagatgcattgttcccatcacgcatggcttctaaactagattgggctaaggcgataaagtctcgtcctaggacactgtagttggccttgtattgtggaatgtagttgtacttgctttcagaccgaactttgtcgatcgctgcagctacaaccaagtcttcattttggacaatttggtcagtctcacgtaggaagcctttttgaacagcatcataagcatttttagacaggctacctgttgcaatggttgtgagggttgcggacaagcgagcgatcttctctggtttagtcaagttttgacggtagatacggtcagctaattccactgttcctgctccacctgggatcaagccaaccccaacctctactagaccgatgtaggattcagctgcagccacaacgaatggggtgtgtaagagaagttctgctcccccacctaatgcccgaccagcaacagctgcgacaactggtttcgctgcgtatttcaagcgagaaacggcttggtggagttcttccgttccttgacgaacttcagtgtcttgcgccttgttgtcgatggcttctttcatcaagttgagattagccccgtaagagaagtgaggaccaggtgtgtgaaggaccaagcctttgtagtcttcctcttctaaaacatcgacggcttcaataatatctttttggaagtcgctacttaaggtgttgttcggtgttagcatttgtaggagtaagacgccatcttccgtcacatctagccggctagatccctctttttcccaaagagtcttagcgacgaagctttgaacttcggcaacattggaaatgccttcgccttctttgtagaacggctcagttcggcctttcacccattcaggcaattcagtgtcactgcctgggatgtcgtcaatttcctcttcaattcgtttggctacgcgttcaacaccgattaagtcccaagcttggaatggtccaactttccagttgtagccccaaaccattgctcggtcaatgtttttgtattcgtcagtggccttacccacgttaatagcagagtagaagaagaggttccgcaaggttttccacaggaagagaccaatttcgtcttctgcttcaaagatagtgttgaagttgtgtttcaagtccttgccgaggttgtttaaaatgtcaaagttaacgtctttcggttggacatagtcctttttctctaggtcaaagataagttttgacccgtcttcttgttttttgtagaagccttggcctgacttgtcacccaaccaaccttggtcaaccaagtattcaggtgtttgaggaagtttaaagtattctgcttcttcagggtcatcttttaggccgtgagagacatggtagccgatatcgatcccgacaaagtcagagaggcggttggttcccatccgagggcgaccaagaatttcaccagacagggtgtcgacttcgttaacagctaggccttcttgttctgcccggtaggcaatgtccataccagtaaaggttccaatccggttaccgcacaaagcctgaaacgtcgtggcagataacaacccctttccctagggtgtaggtagtgaaatcggacaactcttggacatatttttcatcagttcccttgtgtttgatgatttcaaccaatttcatgacacggactgggttaaagaagtgtagtcccaagaaacgtttttggaaatctggatcaaaaggttccgcaatgtcagctatgggaataccagaagtgttggtagctaagatagctgaatctttggcaactttagcaactttaccccaaatgtcgtgcttaatatctagctcttcgctgaccgcttcaatatagaggtcagaatcgtttgcttctttgaggtcatccttaaagttcccaatgcttaaattaactgctaggttattatcatagagtaagccttttttacggtgggtaatccgtcctagggcatccttagctagcttgttggggttatcttcgtccactacgatgtctagtaattgaacttttaaaccaacattaatgaggtgggcagcaatttggcttcccattgcaccggcacctaaaactgtaactttatttatactcattcttttacctccactgtaatctaacaggtcttgttaacttatctttattcaaagatcaattctgcttcagttgcttcttgaatttcttcgtttgtaaagtcagggttggtttcaacaacaaccaaaccacgttcagtcggttcaaaaacgcccatttcagttacaatcaagctgacccgaccttcacctgttagcggcaaggtacattgtcttaggatcttgtggttgcctttgttggtgtgttccatggccacgataacccgcttagcaccagcaactaggtccatagcgccccccatacctgggacatacttgcctggaatcttgtagttggcgatattgcctttttcatcgacctggagggcacctaagacggttatatcaacgtgtcccccacgtactaggccaaaggaatccgcactgtgtaagaaggctcctccgacatccacactagcgggttggccaccagcattgataatatttgggtcaacctggtcttcagctgggctaccccctaagtttaggatcccattctcggagtgtagggtgacatcgatatcacttggcacatagttagctaccagggttgggaccccaataccaaggttgacaacgtctccattttgcaattcttttgccacacgttctgcaataatattgtttagttcttctttactgagtgcaacggccataattatccctctccttttacaatgtagtcaacgtaaacgtgaggaactttgatgtggtctgggttgagttccccttctttaacaacttccttggcttcgacaataacttccgtacctgctgctgccatgacaacgttaaagtttggtgttaccccgtggtagtccaagttccctttttcgtcagcccggtcagcataaatcaaggcatagtccgcaaataaaggtttttcaaggatgtagtctttaccatcaatgtggaagctatctttaccttcagcaacttctgttccaacaccagttggggtcaagaaaccaccgataccgtaacctgccgcccgaattcgttcagctagagtcccttgggggataagggtgacttccatttccccttcgttcatctgacggacagattcagtgttggtcccaatgtgggtagcatttaaagttttaacttgcttgttggctactaacttacccacaccaatttcagcagttgcggtgtcgttaacgatcatggtaatgtcttttaccccttgttcgattaactcgtcaattaactggtaagggcaaccaacacccccaaaaccaccgatcatgacactagaaccgtcttttatctttttaatcgcatcttgctttgaaatgattttatcagtcattttgtatccaccaccgtttttccctttcaatatccttttcttttctaactttcttagtcaggtctatctcttaaagcagacctttaacgaaacactgttttgctccaagactaaagtaacttccggctagcagggaaagcctagctttaaacgagaatgttatcgctttcataataagcaaattcttactgccggtaagactttatcgggctataccacaggagcagatttgacccgtccttcttgcttctccctgctactttggccaaatacttgcttgcacttagttcaaggcttggggaaaagaattaccacataagatttcgaacacttcattctgtcagcttgcaaagcttcggtctcctattaaagtaaatcgaatagacttggtctcttatcctggacctgagagctagaatcacacccttcttaaaaaaatgttaacggttacaatatatgtaaaaatataagtcacctaagtcatcgacctggtctaaggtcctaactggagccatcaaattgagtcaatcatttgccgtcccagtcttccttagacatgggtcccccaataatgacttagatgatggaaaggtttacatatttattgtatccgctttctcatttatcatagcaaagtcttggatttttgacaagtagatttttaaaataaaatattatttttttgtaaattttctaaataactcgatgaaagctattcttataggattaacctggcttttgggggttatttaagaacaataatgtttttaagttaaacaagagaaaaatgataaaacaatatttagaactaatttagccttttcggtcgcaaatcgtttagatggttttattttctatgcttaggcctagttttccttggtcaaactctttgtactaactttttcttctggctggccaaacagcctggacgtctctatttcccatttggccagcttctttatcggccaaacaaaaactctccccagacaagtcactaacttgtctgaggagagtcggtttttatcctattgctaggaagatggggtatcagctaaaagctgtctaggtccttgcttaccgttcaccaacgtattcaaggataccagcagcacccataccgccaccgatacacatggtgatcaagccgtatttgctgtctttacgacgtttcatttctgagagaattttagctgtcatgatagcaccggttgcccctagtgggtgaccaagagcaatcgcaccaccgttgacgttggtaatctcagggtccatgttcaattcacgcatggaagcaatgatttgagaaccaaatgcttcgttaaattcaatcaagtccatgtcttccaatttaagtcctgttaatttcataactgcaggaactgcttctactggaccaatccccatgatttcaggtgagacaccagcaactttgaatccaacaaatttagcaattggtttgacgccgagttctttgaccttatcaccagacatcaagaccacaaagccagcaccgtcagtaatgggtgaagattgaccaggtgtaacagtaccgttgcgacggaaggcagttggcaatttagccaagctttccatgcttgagctaggacgaatagtttcgtctttgtcaaagacggttgttgtcatttccacaccgttttcagtgtatttaggggtttgggcattgaccgggatgatttcgtcgaatctaccagcctcttgagcagcagctgctcggcggtgagattcaaccgcaaaggcatcttggtcttcacgagaaatgttatatttgtcggctacgttttcagcagtgatccccattgggataccagtttttggtccttcttcttgaagggttgggttattggtcgcttcgttcccacccattggaagggaggacataaattcaaccccaccagcagctacaatgtcgttttggccagcaataatagagttagctgctgttgcgatggtttgtaaaccagatgagcagaaccggttaacggtttgtccaggaaccttttgggacaagccagctcttaaggcaatggttcgggcaacgttattcccttgtgggccttctggagtggagcaaccgacaatgacatcttcaatagtagttgggtcaaagtccccttcaattcggtcaatagttccttttagaacctgagccgcaatgtcatctggtctagagtggtaaagggctcctgatggtttccctttggcaacggcagaacggccataagcaacaatataagcttcttgcatccttattcaaatcctttcatatagctcatttagctgatgatcttgtcaaaatgattagttacgcaatggtttgttgttttctaacatgtaagtgatacggtcgtaagttttgtcttcttgactaagggtaacaaagttgtcaacttcgacttgaagcaactggtcttcgttaacgatagtgtggactggtacttggccaccagcaagaacttccgcaagcttggttccaacgaagacatcatagtcagaagcgaagttaccgtcgcgagaagattctaagttggattgtgctagggcgataaagtcggtacctaagacactgtagttagccttgtattgtgggaagtagttgtatttgctttctgagcgaactttgtcgatcgccgcagcaacaaccaattcttcattttgaacaatttggtcagtctcacgtaagaagcctttttgacgagcatcgtaagcgtgtttagaaacactaccggtagcgatagtttgaagtaggtttgacaagtgtttgatttgttcaggtttggtgtagcctttacggtagatacgttcagcgagttcaactgttcctgctccacctggaatcaagccgacgccagcttcaactaaaccaatgtaggattcagcagcggctacaacgtgggtggagtggagtagtaattcagcaccaccaccaagggcccggccagatacagctgatacaactggtttagaagcgtatttcatgcgagaaactgcatagtggagaccttcagttccttcacgggtttcagtgtcaacaacaccacggtcgatggcatctttcatgtcgttcaagttagccccgtaagagaagtgtggacctggagtgtgaaggactaaacctttgtagtcttcctcttctaaaacatcaattgctttgacgatgtctttttggaagtcaagggtcagggtgttatttggagttagcatttgaaggagtaggacaccgtcttcagtagtatccaaacgactagttccttcattggtccataggttttcgtggtaataagtttccacttctggcacgctagaaatgccttcgccttctttgtagaatggctcagttcggcctttcacccattcaggcaattcagtgtcactgcctgggatgtcgtcaatttcctcttcaattcgtttggctacgcgttcaacaccgattaagtcccaagcttggaagggtccaactttccagttgtagccccaaaccattgctcggtcaatgtttttgtattcgtcagtggctttgcccacgttaatagcagagtagaagaagaggttccgcaaggttttccataggaagagaccgatttcgtcttctgcttcaaagatagtgttgaagttgtgtttcaagtccttgccgaggtcgtttaaaatgtcaaagtccacatcttttttctcaacgtagtcttttttctccaggtcaaagatgagtttagacccgtcttcttgttttttgtagaaaccttggccagacttgtcacccaaccagccttggtcaaccaagtattcaggtgcttgaggaagcttgaagtattcagcttcttcagggtcatctttaagaccatgggaaacgtggtagccaatgtcaatcccgacaaagtcagataggcggttggttcccatacgaggacgtcctaatacttgtccagatagggcatcggtttggttgacagcaaggccttcttgttcggcccggtaggcaatgtccataccagtaaaggttccaatccggttacccacaaatcctgtgacgtcatggcagatgacaacccctttacctagagtgtaggttgtgaagtgggataggtcttccactactttttcatctgttccttggtgtttaatgatttcaaccaatttcatgacacggactgggttgaagaagtgtagtcccaagaaacgtttttggaaatctgggtcaaaaggttccgcaatgtcagctataggaataccagaagtgttggtagctaggatagcagagtctttagcgacttttgccactttaccccagacatcgtgtttgatttcaagtttttcactaactgcttcgatgtataagtcagagtcgtttgcctctttgaggtcatcgttaaagtttccgatgcttaagttagctgctaactcattgtcgtaaaggagaccctttttgcggtgggtgatacggcccttagcttcttttgctaatttgttaggatcgtcttcatcaaccacaatatctaacaattgaactttcaaaccaacattaaccaggtgggctgcaatttggcttcccattgctcctgcacctaaaactgtaactttatttatactcattctattacctccacatttaattttatatattactctgaaatatatccaacttttttcgcttgttcagttagttggtcacgtacttctgggtgggcaattgcaatcagacggcggacacgttcactaatgctttggtttttcaggtgggcaataccatattcagttgcaatgtagtctgtttcagaacgtgggatagtgactggagtcccttctggtaaggcgaatttgatgttggatgacaattcacctgttttcttgtccttgttgacagaccggacacagaagaaacttttaccgccttctgaaatattggctgcacgggcaaagtctaaggccccacctgtcccagcaataatccgggtcccagccccttcagagacaacttgacccgtaatgtccaccattaggcaggcattgatcgaaatcagcttgtctttttggccagccttgtaagggtcaaccacgtcatagacgggttcgatagagatctggtcactttcaccagcaaaattgtacaagtctttggaccccatggcaaagccaccaacgatatctcctgtgataactccttctttggcaagggtcatcatggattgggtaatcatttcagtgtggacagccaagtctttcttgtcacgtaaaccgtatgaaacagctccagacaagccgccaaccccaatttggacggtcgatccgtcttcaacttccggtaaaatgtggctagcaatttgcttgtcaatttcaccagactctaattcgggaatttcagctagcggctcatcttgctcgaaaatcaagtccacatcatcgatatgaagggtggtagacttccctttgactgggggtacatccttgttcacttggataatgacccggtcagccacatcagcaattaacttcccttgggcaactcccataggtcccaagttaaagtttccatcttcatccatggcagcggctgttgtcacgaagacgttgggcttaaccacatttttgataaagtcttccgtatttgaaaagttaaatgaagtcacactgaataatccattctgagcatattggcgttcaagggcaccgacaaagaatgaattgtagtggacatgggccgctacttccggttcagttaaaaagcggaagggagtagttaaaaatgatgaaaagatttcaacattgttcaattcctcgtagcgattttcaatttttttgagcaagtcaactggcatagctgccacagagttagccgctatccggtcgccatccttaatggactgggccgcttcatcgattgtgactttcttttcctggtattggtcttggtaggtcataaattcatttcctcctcttgtcagaacaccggcagggctgactaaaccctgccaggatagctattagcaatggtctttatcactaacagcaagctgcagtagcaaagacactttatcaaagatggctaatggctggttcttaaacaaaagcagagtgaccagttaggcttcggccaataattaaagcgttcatttcgtaagaaccttcgtaagtgaagatggcttcagcatctgcaaagaagcgggcaatgcctttttcaagggtaataccgttcccaccacaagcagcacgaccagctgcaactgattcacgaagtctttgagaaataaacaatttaccgattgaagagtttacctcgtcaaagttgcctttttcttgttgcttaacgatttggtcacatagggccaagcttgcagttaggttggctttcatcacagcgattttttcttggatcaattggaatttagcaattggacggccgaattgtttccgctctttcacgtatttcaaggttgcttctaaggcaccagccatcataccagttgcagagaaagcaactcctgatcgagtgatgtaaaggactttcgcaacatctttaaagctgttgatgttttgcaggcggttttcttctttgacttcaacattgttcaaggtgaagtcagcgttttcgaccatacggagagaaattttaccgccaattttttcgatttcaagaccctcttgtcctttttcaacgacgaaacatttaacgtcgccagtgtcagcatctttggcaaagacggggataatgtcagcagtagttgccccaccgatccaacgcttgtggccgtttaagatccatttgtcgccatcttttttggctactgtttcaagaccaccagcaacgtccgaaccgtgttctggttcagttagggcgaaacaagtctggagttcgaagtccaagattttttcacaccaacgttctcgttgttcatcattaccaccaagtaagaaggtgtaaaatcctaaacctgagtggacaccagagaaggtagaaatggaaacgtcaaaacgagacaattcatatgctaggaagaaggtgtagtattgactagtattgaaaagaccttctgtttggtaaacacgggggtcttttaagtagttaacgtcattaaccactgctttgaattgttcgaaaggtgtttcacctttttcccagtattcatcgataactggtcgaaggtgtttttccaaggattggcgtagttcgtaaagaacttccacttctccctctgttaagttgtctccaatattaaagttatcttctgggtaaagctctttgagtaactcggctttgtctgccataataattcctcatttctaattgtttgggtctcgactgctgacactaaactgtggcaaatttcaggtagctcatcaacttcaacttaaaagaacaatttcgaaagtctaagtgactttcctctttcccacatcaaaagaagcaagagggggaagcttgccgttgaagaagggttttggactactatgctgccacagttctcctcatcctgttcctaggctgaataccccttgatgtttgtgttgggaaaaaatccatgtgcgacttttactgttaatgttcaacaaactagcaagccttcaaagccattaagccagtttgtccaccttcatgatctaagatggtcttttttgttgaaagttagtggcctaacctggtccagtgaaggaagcacttggctatccttcagtcaccatccctcctttgactttgtgattacatcatatcaaggaaagcggtaacggtaaagggaaaacattttgaaaaaaagcaatagtgaaagaggtaacttcatattaaatctcttataaaaaatagctataaggccttattcgggcaaatcttataatgagaacattttcaaactttgaaatcattaataaaatgtaaaggcttttacaaaaatccagactttgtgaataaaataatttatttaaagcgctttatttgtcaaaattctttctaaaaataaagagactcaccgacccaacttttgaagtgccgtctaagcttggcggtgagactcaatttattatttatttttaagcatttaaagcgaagattttcccttcgccaaattaattatctgcttcctggtctgcttggtcttcctcttcttggtcattatcgtcttcctgaccctcatctgactccccgccttggtcaggactatcgacaagttcatattggggagccaaggcttcttctgggtctaatagtcgctcaagggcaggacgtgaatcttccggaatgtcaaccaaaataggggtcaagctattggcttctacttccccataatcttcagcagacaagtggatttcttcctggtctagtatgacttggtcgtcactgttggcaaagtctagggtcaagtcaaagtcgctgtaggcctggtcggtccggttagctaacatgaagatggttgtctcatagttacctgttgcgatcccggtccagtaaagggttagctggccatccagtgaaaaaccggcagctgggttgacgatattttcatcttggaccatggccatgatatcgtcgccttgtgggtcattggcaataatgggtggagtagtgacagcaaggtctggtacgtccccactttcaatatcagccagtaattcttcctgctggcgaacagtcattacataagtagggttgtagcccacattgtagccttcaggtgtttgatcttcttggtcgtcaacctcttcttcctggtcatcatcggctacttcttcctcttccagcccgtctatcaagtcctcttcagtatcaaagttcaaattggctaaagtgatctctccctcctgaaagccttctccttctatggcttcagtatcatccaaggggagttcgatataaaccggcatggcagtcccttgttctaagacgccaaacatgtccttgcctaagtagagggggtagtcttccaagactgcctggcctgcagaattgtagtgggtaacttcaaaagacaggttggtcatgtccaagttcagtcggttagtcaggaggtaaaccccgtacagttcttcctctgcactgaggtagataccagagtagtccagggttaattcgccaacttctccaatctccccgtcttcatctgcttctacctgctcagataagaaggcaagggcatcatcgttaaagggggacacttgagctaagcggtccgactcttgcaagacaaaagccaagtcattagcgtcctcttcactgtcctggccttccccttgactgcccttctcttgactagcttcttcttggctcgtctcttcttggtcttcctcatcaacagtatacatggagcaggcggttaacaaaccagctgctaggattaataaagctttttttagcatgaacaaatctcccaattctcagtttttaaaaagtatacacccttaaattatatcaagggtctgcccatatttccattactcccagctggttttccaatccaaaaagaaattttgaccccatttgactgaataaaaccagtctctggcaattgaaaaagccggcatgcgagctaaaaaccactagaccccgaaagcagggtccagtggttttcgtaagttctatccatttgtcgttaggataggcgggcctttagtctttggtaatttcaaattcgtgggctagttcaacattacggtcttccccttcaagcaattcaccttcgatttggtaaatttcaacagcaattcggttgctttcgacagtgtaaaccgcaaagttttgaatagcagagtcacgggcgttggagtgggagtcttcaaattctggagcatcctgtggctgttcgccaaattcaaagaggttgttccagtattccacgtcttcttctgtcaaccagtccaatttaggtcggacttcgtgaaggcggtcgatatttttgctgtagatgtcgtcgtaagccttggtccccccattgtttggtaggacaaagactgtcccctcagggttggtgtaggtcttcactccatcttcttcagtaatggattcttcatcaacttccgcatttgagaagctgacatcacttggaacaaaggttaggggtttggtttgggaaataacgtggtcgtgaccttgaagggccagatcgacgtctaagcggtcaattaattccatgaattcttctctgactaactgcacatcctcatcttggagggagtggtaggatttagagaagagcggcttgtggtagttcaagataatccactcagccccattttctcgggcttggttgatatcttcttcgatccacgccaattgttcatcaccaatagcttttccgtcagggttgtcgtccgattccttgttgtcgttagtgttcaatgtaacaatgtgggcattgttgtaggtgaccgagtagtatgacccaccgtcaatggcatcgttggctgctggcacgttaatgtgctggttgaaggcctctgttagcatgtcgtcatcataggcaagggcatattcatcgtggttacctggtgcaacaatgaaaggaatttgcaagaaggattcttctgattgggtgaagaggtcaacccattcatcttccacttcagcaatctccaccacgtcacctgagtggaccacaaagtctgggtcttcaactgtttctaatgcttttgcgatagtgtcagccccaaatgacgcttcattgcgaacatgttcattccagtaggcgttttgggtgtctgtgtattgaatgaaggtaaaggaatcatcatcgccaccagaagttttaaaacttccgacttcacttttctccccttcttcagatccgacttggtagtagtaagttgttccgggttctaaatcagttgctacagccttgtagacatgttcgtcgacgtcaattaattctaattgaccaacttcgccaccagtccagtctttgttttcgacatcgatattttcatcggtgtagtagccattaataacaggttcgccgtcttcttcaaccggttccccttcatcgtcaagctccacatcagcaaaaataaagtggccatcttcagtccgctcaccgtagcggttagtgacttgctccacttcagcttcaaattcttgggcatcgcttaggtcttcttcggtcgaaacccaaactttagcatcatcaaaggcttcggtagtgtaccagttaaagcccatttgggtttgggagtctccgttaaagctagtgatgatacggttaggagcgttgttgtcttcaacttctgctacttctggcttttcgtcggataattcaacgccagccacgtcactctcttctccattgccatcttctgagtcatcatctgaatcgtcgtcagattcgccgtcatcttctgagtcctcttcgccatcttctgaatcttcgccgccttcagaatcagattcttcctcttcatcttggccaccattttcttcaccagcagtttcatcctgactgtcttcttctgcctcttgactagtctcagcttcagtatcttcaacttca

SEQ ID NO: 6652 - DNA, 22 bp, Alloiococcus otitidis
acgcttcatctctgaagctagc

SEQ ID NO: 6653 - DNA, 23 bp, Alloiococcus otitidis
atcttcctgcttgcaggaagagg
